(19) United States
(12) Patent Application Publication
(10) Pub. No.: US 2026/0076989 A1
(43) Pub. Date: Mar. 19, 2026

(54) OLIGONUCLEOTIDES, COMPOSITIONS AND METHODS THEREOF

(71) Applicant: WAVE LIFE SCIENCES LTD., Singapore (SG)

(72) Inventors: Jason Jingxin Zhang, Walpole, MA (US); Naoki Iwamoto, Boston, MA (US); Christopher J. Francis, Carlisle, MA (US); Chandra Vargeese, Schwenksville, PA (US); David Charles Donnell Butler, Medford, MA (US); Sethumadhavan Divakaramenon, Lexington, MA (US); Genliang Lu, Winchester, MA (US); Subramanian Marappan, Acton, MA (US)

(21) Appl. No.: 19/271,472

(22) Filed: Jul. 16, 2025

Related U.S. Application Data
(62) Division of application No. 17/177,111, filed on Feb. 16, 2021, now Pat. No. 12,403,156.
Application No. 17/177,111 is a continuation of application No. 16/305,937, now Pat. No. 11,013,757.
(60) Provisional application No. 62/345,709, filed on Jun. 3, 2016.
(60) Provisional application No. 62/405,816, filed on Oct. 7, 2016.

(51) Int. Cl. A61K 31/7125; A61K 31/7088; A61P 21/00; C12N 15/117

(52) U.S. Cl. CPC A61K 31/7125; A61K 31/7088; A61P 21/00; C12N 15/117; C12N 2310/17; C12N 2310/31; C12N 2310/315; C12N 2310/351; C12N 2310/3515

(57) ABSTRACT

The present disclosure pertains to the recognition that immune responses mediated by CpG oligonucleotides can be affected by the stereochemistry of modified internucleotidic linkages such as phosphorothioates. In some embodiments, the present disclosure relates to chirally controlled CpG oligonucleotide compositions comprising CpG oligonucleotides comprising multiple modified internucleotidic linkages such as phosphorothioate linkages, wherein the oligonucleotides comprise one or more CpG region motifs having defined stereochemistry patterns of chiral internucleotidic linkages. In some embodiments, CpG oligonucleotides comprising one or more CpG region motifs are capable of agonizing an immune response. In some embodiments, CpG oligonucleotides comprising one or more CpG region motifs are antagonistic. Methods for making and using chirally controlled CpG oligonucleotide compositions are also described. In some embodiments, no immune modulation is desired, and the present disclosure provides methods of identifying chirally controlled oligonucleotide compositions which have decreased immune modulation.

### CROSS-REFERENCE TO RELATED APPLICATIONS

[0001] This application is a divisional of U.S. application Ser. No. 17/177,111, filed Feb. 16, 2021, which is a continuation of U.S. application Ser. No. 16/305,937, filed Nov. 30, 2018, which is a United States National Stage Application of PCT International Application No. PCT/US2017/035837, filed Jun. 2, 2017, which claims priority to United States Provisional Application Nos. 62/345,709, filed Jun. 3, 2016, and 62/405,816, filed Oct. 7, 2016, the entirety of each of which is incorporated herein by reference.

### SEQUENCE LISTING

[0002] The instant application contains a Sequence Listing which has been submitted electronically in XML format and is hereby incorporated by reference in its entirety. Said XML copy, created on Nov. 13, 2025, is named 2010581-1521.xml and is 2,628,309 bytes in size.

### BACKGROUND

[0003] Oligonucleotides are valuable therapeutic, diagnostic and analytical agents, with many important applications.

### SUMMARY

[0004] Among other things, the present disclosure encompasses the recognition that oligonucleotides, including those comprising any of various CpG region motifs, are useful and valuable as immunomodulatory agents. The present disclosure also encompasses, inter alia, methods of identifying oligonucleotides and compositions thereof which have improved immunomodulatory activity, stability, utility and/or effectiveness.

[0005] In some embodiments, the present disclosure encompasses the recognition that structural elements of oligonucleotides, such as base sequence, chemical modifications (e.g., modifications of sugar, base, and/or internucleotidic linkages, and patterns thereof), and/or stereochemistry (e.g., stereochemistry of backbone chiral centers (chiral internucleotidiclinkages), and/or patterns thereof), can have significant impact on properties, e.g., activity, stability, etc., of oligonucleotides. In some embodiments, the present disclosure demonstrates that oligonucleotide compositions comprising oligonucleotides with controlled structural elements, e.g., controlled chemical modification and/or controlled backbone stereochemistry patterns, provide unexpected properties, including but not limited to those described herein. In some embodiments, the present disclosure provides methods for modulating properties (e.g., activity, stability, etc.) of oligonucleotides through chemical modifications (e.g., chemical modification of bases, sugars, and internucleotidic linkages) and/or stereochemistry (e.g., stereochemistry of chiral internucleotidic linkages and patterns thereof). In some embodiments, the present disclosure provides chirally controlled oligonucleotide compositions which provide improved properties, e.g., enhanced TLR9 agonist activities, reduced TLR9 agonist activities, enhanced TLR9 antagonist activities, reduced TLR9 antagonist activities, etc. when compared to a reference oligonucleotide composition, e.g., a chirally uncontrolled (stereorandom) oligonucleotide composition.

[0006] In some embodiments, the present disclosure encompasses the recognition that conjugation with lipids, which incorporates lipid moieties into oligonucleotides, is unexpectedly effective in improving oligonucleotide properties, e.g., their TLR9-related activities, delivery, pharmacokinetics properties, etc. For example, in some embodiments, the present disclosure surprisingly demonstrated that oligonucleotides comprising lipid moieties have unexpected high hTLR9 antagonist activities compared to oligonucleotides absent the lipid moieties. In some embodiments, oligonucleotides comprising lipid moieties demonstrate not only improved hTLR9 antagonist activities, but also surprisingly improved other properties, e.g., activities toward their complementary nucleic acid targets, improved delivery, pharmacokinetic properties, etc. In some embodiments, lipid conjugation is utilized together with other structural elements, such as base sequence, chemical modifications (e.g., sugar modifications, base modifications, internucleotidic linkage modifications), and/or stereochemistry, to improve oligonucleotide properties, e.g., TLR9-related properties. In some embodiments, a provided oligonucleotide comprises a lipid moiety, and a base sequence, pattern of chemical modifications, pattern of backbone linkages, pattern or backbone chiral centers, and/or pattern of backbone phosphorus modifications described herein, for example, those described for CpG oligonucleotides.

[0007] In some embodiments, the present disclosure encompasses the recognition that immune responses mediated by CpG oligonucleotides (oligonucleotides comprising one or more CpG motif region wherein the linkage between C and G is optionally modified) can be modulated by stereochemistry of chiral internucleotidic linkages. According to some embodiments of the disclosure, when oligonucleotides comprise a CpG region motif having one or more chiral centers (e.g., within or adjacent to the CpG region motif), different stereoforms of such oligonucleotides can have different immunomodulatory activity, stability, biological activity, characteristics and/or other activities, one or more of which can impact their utility and/or effectiveness. In some embodiments, chiral centers that can impact oligonucleotide characteristics and/or activities are found in modified internucleotidic linkages, e.g., involving one or more phosphorothioate (PS) or other modified phosphodiester linkages. In some embodiments, the present disclosure provides technologies comprising chirally controlled oligonucleotide compositions of oligonucleotides comprising one or more CpG region motifs with designed stereochemistry of chiral internucleotidic linkages within and/or adjacent to the CpG region motifs.

[0008] Among other things, the present disclosure demonstrates that provided chirally controlled CpG oligonucleotide compositions can have very different immunomodulatory activities when compared to stereorandom compositions which are uncontrolled mixtures of many stereoisomers, e.g., those previously reported stereorandom compositions of CpG oligonucleotides comprising phosphorothioate linkages. The present disclosure pertains, inter alia, to chirally controlled oligonucleotide compositions comprising CpG oligonucleotides which are chirally pure, in that the stereochemistry of each (or at least one) chiral internucleotidic linkage is controlled and not random.

[0009] In some embodiments, oligonucleotides of provided chirally controlled oligonucleotide compositions comprise one or more CpG region motifs, wherein the internucleotidic linkage between C and G is Rp. In some embodiments, oligonucleotides of provided chirally controlled oligonucleotide compositions comprise one or more CpG region motifs, wherein the internucleotidic linkage between C and G is Rp, and the oligonucleotides further comprise one or more Sp internucleotidic linkages. In some embodiments, oligonucleotides of provided chirally controlled oligonucleotide compositions comprise one or more CpG region motifs, wherein the internucleotidic linkage between C and G is Rp, and the oligonucleotides further comprise Sp internucleotidic linkages immediately to the 5′- and 3′-ends of the CpG (i.e., Sp internucleotidic linkage-C-Rp internucleotidic linkage-G-Sp internucleotidic linkage). In some embodiments, oligonucleotides comprising such motifs are agonists for, e.g., mouse TLR9 and provide increased agonist activity when compared to a reference oligonucleotide. In some embodiments, oligonucleotides of provided chirally controlled oligonucleotide compositions comprise one or more CpG region motifs, wherein one or both of the internucleotidic linkages immediately to the 5′- and 3′-ends of the CpG are Rp. In some embodiments, such oligonucleotides provide reduced agonist activities, or provide increased antagonist activities, for e.g., mouse TLR9.

[0010] In some embodiments, oligonucleotides of provided chirally controlled oligonucleotide compositions comprise one or more CpG region motifs, wherein the internucleotidic linkage between C and G is Rp. In some embodiments, oligonucleotides of provided chirally controlled oligonucleotide compositions comprise one or more CpG region motifs, wherein the internucleotidic linkage between C and G is Rp, and the oligonucleotides further comprise one or more Sp internucleotidic linkages. In some embodiments, oligonucleotides of provided chirally controlled oligonucleotide compositions comprise one or more CpG region motifs, wherein the internucleotidic linkage between C and G is Rp, and the oligonucleotides further comprise Rp internucleotidic linkages immediately to the 5′-end of the CpG (i.e., Rp internucleotidic linkage-C-Rp internucleotidic linkage-G). In some embodiments, oligonucleotides of provided chirally controlled oligonucleotide compositions comprise one or more CpG region motifs, wherein the internucleotidic linkage between C and G is Rp, and the oligonucleotides further comprise an Rp internucleotidic linkage immediately to the 5′-end of the CpG (i.e., Rp internucleotidic linkage-C-Rp internucleotidic linkage-G). In some embodiments, oligonucleotides of provided chirally controlled oligonucleotide compositions comprise one or more CpG region motifs, wherein the internucleotidic linkage between C and G is Rp, and the oligonucleotides further comprise an Sp internucleotidic linkage immediately to the 3′-end of the CpG (i.e., C-Rp internucleotidic linkage-G-Sp internucleotidic linkage). In some embodiments, oligonucleotides comprising such motifs are agonists for, e.g., human TLR9 and provide increased agonist activity when compared to a reference oligonucleotide. In some embodiments, oligonucleotides of provided chirally controlled oligonucleotide compositions comprise one or more CpG region motifs, wherein the internucleotidic linkages immediately to the 3′-end of the CpG is Rp. In some embodiments, such oligonucleotides provide reduced agonist activities, or provide increased antagonist activities, for e.g., human TLR9.

[0011] In some embodiments, beyond the CpG region motifs provided oligonucleotides are predominately Sp (e.g., more than about 50%, 55%, 60%, 65%, 70%, 75%, 80%, 85%, 90% or 95%) to provide enhanced agonist activities. In some embodiments, beyond the CpG region motifs provided oligonucleotides are predominately Rp (e.g., more than about 50%, 55%, 60%, 65%, 70%, 75%, 80%, 85%, 90% or 95%) to reduce agonist activities, and/or to provide enhanced antagonist activities.

[0012] In some embodiments, the present disclosure pertains to compositions and methods related to CpG oligonucleotides which comprise a strand comprising one or more of any of various CpG region motifs disclosed herein. In some embodiments, various CpG region motifs, which are defined at least in part by the stereochemistry of the modified internucleotidic linkages, such as phosphorothioates, in the CpG region, can, depending on the motif, either agonize or antagonize an immunostimulatory effect. In some embodiments, the CpG region motif comprises at least one phosphorothioate in the Rp conformation and at least one phosphorothioate in the Sp conformation. In some embodiments, if no immune modulation is desired, the present disclosure also provides oligonucleotides and compositions thereof, and methods of identifying oligonucleotides and compositions thereof which have decreased immune modulation, e.g., those lacking CpG region motifs which agonize or antagonize an immune response.

[0013] Among other things, the present disclosure encompasses the recognition that chemical modifications such as cytosine methylation and/or sugar modifications (e.g., 5-methylcytosine, 2′-modification of sugards, etc.), which were widely accepted as effective for removing TLR9 agonist activities prior to the present disclosure, cannot eliminate or reduce TLR9 agonist activities in certain circumstances. In some embodiments, the present disclosure provides chirally controlled oligonucleotide compositions comprising predetermined level of oligonucleotides of a particular type, wherein the oligonucleotides comprise one or more CpG region motifs, wherein the C is methylated. In some embodiments, the present disclosure provides chirally controlled oligonucleotide compositions comprising predetermined level of oligonucleotides of a particular type, wherein the oligonucleotides comprise one or more modified sugars. In some embodiments, the present disclosure provides chirally controlled oligonucleotide compositions comprising predetermined level of oligonucleotides of a particular type, wherein the oligonucleotides comprise one or more modified sugars and one or more CpG region motifs, wherein the C is methylated. In some embodiments, a modified sugar comprises 2′-modification. In some embodiments, the present disclosure demonstrates that such oligonucleotides and chirally controlled oligonucleotide compositions thereof provide unexpected TLR9 agonist activity. Among other things, the present disclosure demonstrates that TLR9 agonist and antagonist activities of oligonucleotides and compositions thereof can be effectively modulated through stereochemistry (including patterns thereof) of chiral internucleotidic linkages and/or chemical modifications.

[0014] A CpG oligonucleotide composition comprising a CpG oligonucleotide comprising phosphorothioates can be either chirally controlled (e.g., chirally controlled or stereopure), or stereorandom (e.g., a stereomixture). In some embodiments, the present disclosure pertains to a chirally controlled CpG oligonucleotide composition, which is chirally controlled in that the composition comprises a predetermined level of oligonucleotides of an individual oligonucleotide type, wherein an oligonucleotide type is defined by: 1) base sequence; 2) pattern of backbone (internucleotidic) linkages; 3) pattern of backbone (internucleotidic linkage) chiral centers; and 4) pattern of backbone (internucleotidic linkage) phosphorus modifications; wherein each oligonucleotide of the individual oligonucleotide type independently comprises at least one common CpG region motif. In some embodiments, in provided methods and/or compositions CpG oligonucleotides comprise two or more CpG region motifs described herein. In some embodiments, the present disclosure pertains to a chirally controlled CpG oligonucleotide composition, which is chirally controlled in that the composition comprises a predetermined level of oligonucleotides of an individual oligonucleotide type, wherein an oligonucleotide type is defined by: 1) base sequence; 2) pattern of backbone (internucleotidic) linkages; 3) pattern of backbone (internucleotidic linkage) chiral centers; and 4) pattern of backbone (internucleotidic linkage) phosphorus modifications; wherein each oligonucleotide of the individual oligonucleotide type independently comprises at least one common CpG region motif: N₁-(*R/S)-C-(*R/S)-G-(*R/S)-N₂; wherein each (*R/S) is independently a chiral internucleotidic linkage, and N₁ and N₂ are any nucleoside. In some embodiments, the present disclosure pertains to a chirally controlled CpG oligonucleotide composition comprising a plurality of oligonucleotides, each of which: (a) hybridizes with a particular target sequence; (b) has a base sequence that includes at least one C residue in a CpG region motif that is present in all oligonucleotides of the plurality (a “common C residue”) and that is modified, a modified sugar moiety, or both; and (c) includes one or more chiral internucleotidic linkages, so that each oligonucleotide is a particular stereoform, characterized by its stereoidentity at each of the one or more chiral internucleotidic linkages, wherein stereoidentity identifies which stereoisomer is present at a particular chiral internucleotidic linkage, wherein the composition is chirally controlled in that it contains a predetermined level of each stereoform. In some embodiments, the present disclosure pertains to a chirally controlled CpG oligonucleotide composition comprising a plurality of oligonucleotides, each of which: (a) hybridizes with a particular target sequence; (b) has a base sequence that includes at least one C residue in a CpG region motif that is present in all oligonucleotides of the plurality (a “common C residue”) and that has a 5-methyl group, a modified sugar moiety, or both; and (c) includes one or more chiral internucleotidic linkages, so that each oligonucleotide is a particular stereoform, characterized by its stereoidentity at each of the one or more chiral internucleotidic linkages, wherein stereoidentity identifies which stereoisomer is present at a particular chiral internucleotidic linkage, wherein the composition is chirally controlled in that it contains a predetermined level of each stereoform. In some embodiments, provided chirally controlled oligonucleotide compositions provide modulated (e.g., enhanced or reduced) TLR9 agonist and/or antagonist activities when compared to a reference composition. In some embodiments, the present disclosure provides methods of modulating TLR9 agonist and/or antagonist activities comprising providing a provided chirally controlled oligonucleotide composition. In some embodiments, in provided methods and/or compositions CpG oligonucleotides comprise two or more CpG region motifs described herein.

[0015] A non-limiting example of a chirally controlled CpG oligonucleotide composition is T*RC*RG*ST*RC*RG*ST*ST*ST*ST*SG*ST*RC*RG*ST*ST*ST*ST*SG*ST*RC*RG*S T*ST (WV-1698) (SEQ ID NO: 1). *R is a phosphorothioate in the Rp configuration; and *S is a phosphorothioate in the Sp configuration. A preparation of WV-1698 is stereopure or mostly stereopure; most or all of the oligonucleotide have not only the same sequence of base (a base sequence of each molecule or most molecules is TCGTCGTTTTGTCGTTTTGTCGTT (SEQ ID NO: 2)) but also the same pattern of configuration of the phosphorothioates (each molecule is or most of the molecules are *R*R*S*R*R*S*S*S*S*S*S*R*R*S*S*S*S*S*S*R*R*S*S). Unlike a stereopure (or chirally controlled) preparation, a stereomixture preparation comprises a variety of different stereoisomers. A non-limiting example of a CpG oligonucleotide composition which is a stereomixture of stereoisomers is T*C*G*T*C*G*T*T*T*T*G*T*C*G*T*T*T*T*G*T*C*G*T*T (ODN-2006) (SEQ ID NO: 3). * indicates a phosphorothioate which is not stereocontrolled; it can randomly be either Rp or Sp for individual stereoisomers in the composition. The stereorandom (chirally uncontrolled) ODN-2006 and the chirally controlled WV-1698 oligonucleotide compositions share the same base sequence. However, they differ in stereochemistry: ODN-2006 is a random mixture (uncontrolled from e.g., oligonucleotide synthesis using no technologies to effectively control stereochemistry of chiral internucleotidic linkages) of many stereoisomers; WV-1698 contains a predetermined level of the stereoisomer T*RC*RG*ST*RC*RG*ST*ST*ST*ST*SG*ST*RC*RG*ST*ST*ST*ST*SG*ST*RC*RG*S T*ST (SEQ ID NO: 1). For example, a stereopure preparation (e.g., a chirally controlled oligonucleotide composition) only contains oligonucleotides of the following stereochemistry (or mostly only, or with a predetermined level):*R*R*S*R*R*S*S*S*S*S*S*R*R*S*S*S*S*S*S*R*R*S*S. In contrast, a stereomixture is a random combination of stereoisomers which can include 2²³ (2ⁿ) stereoisomers, for example:

*R*S*S*R*R*S*R*S*S*S*S*R*R*S*S*R*S*S*S*R*R*S*S
*R*R*S*R*R*S*S*R*R*S*S*R*R*S*S*S*S*S*S*R*R*S*S
*S*R*S*R*R*S*S*R*S*S*S*R*R*S*S*S*R*R*S*R*R*R*S
*R*R*S*R*R*S*S*S*S*R*S*R*R*S*S*S*S*S*S*R*R*S*S
*S*R*S*R*R*R*R*S*S*S*S*R*S*R*R*S*S*S*S*R*R*S*S

and millions of other stereoisomers. The number of stereoisomers in a stereomixture is determined by the number of chiral internucleotidic linkages; when there are n chiral internucleotidic linkages, there can be 2ⁿ stereoisomers. For ODN-2006 which comprises 23 phosphorothioates, a stereorandom ODN-2006 oligonucleotide composition is a stereomixture of 2²³ or 8,388,608 different molecules. In contrast, a preparation of the stereopure molecule WV-1698 (e.g., a chirally controlled oligonucleotide composition) is a pure (or mostly pure or with a predetermined level) preparation of one stereoisomer.

[0016] In some chirally controlled oligonucleotide compositions, each chiral modified internucleotidic linkage (including but not limited to a phosphorothioate) is chirally controlled.

[0017] In some embodiments, in a chirally controlled oligonucleotide composition, at least one chiral modified internucleotidic linkage (including but not limited to a phosphorothioate) is chirally controlled. In some embodiments, in a chirally controlled oligonucleotide composition, at least one chiral modified internucleotidic linkage (including but not limited to a phosphorothioate) is chirally controlled and at least one chiral modified internucleotidic linkage (including but not limited to a phosphorothioate) is not chirally controlled.

[0018] A non-limiting example of a chirally controlled CpG oligonucleotide composition is a CpG oligonucleotide comprising a CpG region motif: C-(*X)-G-(*S)-N, wherein N is any nucleotide.
[0019] *S indicates a phosphorothioate in the Sp conformation;
[0020] *X or (*X) indicates that, in a population of oligonucleotides or an oligonucleotide composition, some of the individual oligonucleotides have a phosphorothioate in the Rp conformation and some have a phosphorothioate in the Sp conformation at this position.

[0021] In some embodiments, even if one position (e.g., *X) is not chirally controlled, if any one or more other position is chirally controlled, the oligonucleotide composition is chirally controlled. In some embodiments, C-(*X)-G-(*S)-N represents, in a chirally controlled oligonucleotide composition, a CpG oligonucleotide comprising a CpG region motif C-(*R)-G-(*S)-N and a CpG oligonucleotide comprising a CpG region motif C-(*S)-G-(*S)-N. In some embodiments, C-(*R/S)-G-(*S)-N represents, in a chirally controlled oligonucleotide composition, a CpG oligonucleotide comprising a CpG region motif C-(*R)-G-(*S)-N or a CpG oligonucleotide comprising a CpG region motif C-(*S)-G-(*S)-N.

[0022] In some embodiments, the present disclosure provides chirally controlled oligonucleotide compositions of CpG oligonucleotides comprising a sequence of N-(*X)-C-(*R/S)-G-(*R/S)-N, N-(*R/S)-C-(*X)-G-(*R/S)-N, N-(*R/S)-C-(*R/S)-G-(*X)-N, N-(*X)-C*R)-G-(*R)-N, N-(*X)-C-(*R)-G-(*S)-N, N-(*X) (*S)-G-(*R)-N, N-(*X)-C-(*S)-G-(*S)-N, N-(*R)-C-(*X)-G-(*R)-N, N-(*R)-C-(*X)-G-(*S)-N, N-(*S)-C-(*X)-G-(*R)-N, N-(*S)-C-(*X)-G-(*S)-N, N-(*R)-C-(*R)-G-(*X)-N, N-(*R)-C-(*S)-G-(*X)-N, N-(*S)-C-(*S)-G-(*X)-N, N-(*S)-C-(*R)-G-(*X)-N, N-(*X)-C-(*R)-G-(*X)-N, N-(*X)-C-(*S)-G-(*X)-N, N-(*R)-C-(*X)-G-(*X)-N, N-(*S)-C-(*X)-G-(*X)-N, N-(*X)-C-(*X)-G-(*R)-N, or N-(*X)-C-(*X)-G-(*S)-N.

[0023] A non-limiting example of a chirally controlled CpG oligonucleotide composition is a CpG oligonucleotide comprising a CpG region motif: C-(*D)-G-(*R)-N, wherein N is any nucleotide.
[0024] *R indicates a phosphorothioate in the Rp conformation;
[0025] *D indicates a phosphorodithioate, wherein both of the non-bridging phosphorus atoms in a phosphodiester have been replaced by sulfur.

[0026] Additional CpG oligonucleotides comprise a CpG region motif comprising a sequence of N-(*D)-C-(*R/S)-G-(*R/S)-N, N-(*R/S)-C-(*D)-G-(*R/S)-N, N-(*R/S)-C-(*R/S)-G-(*D)-N, N-(*D)-C-(*R)-G-(*R)-N, N-(*D)-C-(*R)-G-(*S)-N, N-(*D)-C-(*S)-G-(*R)-N, N-(*D)-C-(*S)-G-(*S)-N, N-(*R)-C-(*D)-G-(*R)-N, N-(*R)-C-(*D)-G-(*S)-N, N-(*S)-C-(*D)-G-(*R)-N, N-(*S)-C-(*D)-G-(*S)-N, N-(*R)-C-(*R)-G-(*D)-N, N-(*R)-C-(*S)-G-(*D)-N, N-(*S)-C-(*S)-G-(*D)-N, N-(*S)-C-(*R)-G-(*D)-N, N-(*D)-C-(*R)-G-(*D)-N, N-(*D)-C-(*S)-G-(*D)-N, N-(*R)-C-(*D)-G-(*D)-N, N-(*S)-C-(*D)-G-(*D)-N, N-(*D)-C-(*D)-G-(*R)-N, or N-(*D)-C-(*D)-G-(*S)-N.

[0027] The terms N, *R, *S, *R/S, *X and *D as used herein can be used to define the characteristics of any oligonucleotide or oligonucleotide composition.

[0028] In some embodiments, a chirally controlled CpG oligonucleotide composition comprises a CpG oligonucleotide comprising a *X in a CpG region motif. In some embodiments, a chirally controlled CpG oligonucleotide composition comprises a CpG oligonucleotide comprising a *X outside a CpG region motif. In some embodiments, a chirally controlled CpG oligonucleotide composition comprises a CpG oligonucleotide comprising a *D in a CpG region motif. In some embodiments, a chirally controlled CpG oligonucleotide composition comprises a CpG oligonucleotide comprising a *D outside a CpG region motif. In some embodiments, a chirally controlled CpG oligonucleotide can comprise a *X (either inside or outside of a CpG region motif) and a *D (either inside or outside of a CpG region motif). In some embodiments, a chirally controlled CpG oligonucleotide can comprise at least one *X (either inside or outside of a CpG region motif) and at least one *D (either inside or outside of a CpG region motif). In some embodiments, a chirally controlled CpG oligonucleotide comprises a CpG oligonucleotide comprising at least one *R and/or at least one *S in a CpG region motif, and, optionally, at least one *X (either inside or outside of a CpG region motif) and at least one *D (either inside or outside of a CpG region motif). In some embodiments, a chirally controlled CpG oligonucleotide comprises a CpG oligonucleotide comprising at least one *R and/or at least one *S in a CpG region motif, and, optionally, at least one *X (either inside or outside of a CpG region motif) and/or at least one *D (either inside or outside of a CpG region motif).

[0029] While researchers have previously reported CpG oligonucleotides which are stereomixtures, the present disclosure pertains to CpG oligonucleotides which are chirally controlled. In some embodiments, chirally controlled CpG oligonucleotides provide unique insights into CpG region motifs, including the elucidation of various CpG region motifs, defined at least in part by the stereochemistry of the phosphorothioates, variants of which are able to agonize or antagonize an immune response.

[0030] In some embodiments, the present disclosure demonstrates in both mouse models and human PBMCs that a stereorandom oligonucleotide composition and a corresponding chirally controlled oligonucleotide composition can display very different activities against TLR9. In some embodiments, the present disclosure demonstrates that for mouse TLR9, some stereopure CpG-oligos with all-Sp backbone are strong agonists, whose activities are further modulated by the chirality of the PS bonds in and adjacent to the CpG motifs (CpG regions). In some embodiments, human TLR9 (hTLR9) activities are affected very differently, in several cases, with agonists preferring Sp chirality on the 3′ of CpG motif. In some embodiments, the present disclosure demonstrates that 2′-modifications on the ribose ring completely eliminate agonist activity on mouse TLR9, but not on human TLR9, which is more relevant to drug discovery for human diseases. In some embodiments, the present disclosure demonstrates that mouse and human TLR9 respond differently to stereopure CpG oligonucleotide compositions with 2′-modifications and CpG methylations. In some embodiments, the present disclosure surprisingly demonstrates that phosphorothioate chirality is an important determinant of TLR9 activity.

[0031] In addition, while the present disclosure showed that, in at least some chirally controlled CpG oligonucleotide compositions, some CpG region motifs had greater immunomodulatory activity (e.g., greater agonistic or greater antagonistic activity), the present disclosure encompasses any chirally controlled CpG oligonucleotide composition, wherein the CpG region motif comprises a stereodefined phosphorothioate or other chiral internucleotidic linkage, wherein the CpG oligonucleotide demonstrates a greater agonistic or antagonistic activity than a negative control (e.g., in the absence of the oligonucleotide composition).

[0032] Thus, in some embodiments, the present disclosure presents the surprising recognition that stereochemistry of chiral modified internucleotidic linkages such phosphorothioates in the CpG region motif can greatly affect the agonistic and/or antagonist effects of a CpG oligonucleotide. In some embodiments, various motifs, defined at least in part by the stereochemistry of the phosphorothioates, can either agonize or antagonize an immune response.

[0033] In some embodiments, the present disclosure pertains, inter alia, to compositions and methods comprising a CpG oligonucleotide comprising a strand comprising one or more copies of a CpG region motif, wherein the motif comprises stereodefined (Rp or Sp) phosphorothioates (or other chiral internucleotidic linkages).

[0034] In some embodiments, if no immune modulation is desired, the present disclosure provides methods of identifying oligonucleotides which have decreased immune modulation (e.g., those lacking CpG region motifs which agonize or antagonize an immune response). In many cases, oligonucleotides intended for therapeutic use comprise phosphorothioates or other chiral internucleonic linkages which are not chirally controlled. In some embodiments of the present disclosure, oligonucleotides intended for therapeutic use can thus be screened for immune modulation, and modified variants of these oligonucleotides (e.g., chirally controlled oligonucleotides) can be identified which have less or greater immunomodulation (agonism or antagonism), and/or greater stability, increased biological activity, shorter length, or other improved characteristics, as desired. A person having ordinary skill in the art appreciates that designs (e.g., chemical modifications and/or stereochemistry) identified by the present disclosure for enhanced activities (e.g., TLR9 agonist or antagonist activities) are also useful for preparing oligonucleotide compositions with reduced such activities; when such activities are not desired, designs identified for enhanced activities are reduced or eliminated from oligonucleotides.

[0035] In some embodiments, the present disclosure provides methods for modulating immune response, comprising providing a provided chirally controlled oligonucleotide composition. In some embodiments, the present disclosure provides methods for modulating TLR9 activities, comprising providing a provided chirally controlled oligonucleotide composition. In some embodiments, the present disclosure provides methods for treating a disease, comprising providing a provided chirally controlled oligonucleotide composition. In some embodiments, the present disclosure provides methods for treating cancer, comprising administering to a subject a provided chirally controlled oligonucleotide composition. In some embodiments, the present disclosure provides methods for treating cancer, comprising administering to a subject a provided chirally controlled oligonucleotide composition and a cancer therapeutic agent. In some embodiments, a cancer therapeutic agent is a vaccine. In some embodiments, a cancer therapeutic agent is an antibody, such anti-EGFR, anti-PD1, etc. In some embodiments, a cancer therapeutic agent is an immune checkpoint antibody. In some embodiments, a provided chirally controlled oligonucleotide composition provides enhanced TLR9 agonist activities. In some embodiments, a provided chirally controlled oligonucleotide composition provides enhanced TLR9 antagonist activities.

[0036] In some embodiments, the present disclosure provides methods for assaying TLR9 agonist and/or antagonist activities, comprising providing a provided chirally controlled oligonucleotide composition. In some embodiments, the present disclosure provides assay systems for accessing TLR9 agonist and/or antagonist activities, comprising a provided chirally controlled oligonucleotide composition. In some embodiments, a provided method and/or assay system is based on a method and/or assay system widely known and applied in the art, by replacing a stereorandom oligonucleotide composition in the method and/or assay system with a provided chirally controlled oligonucleotide composition in accordance with the present disclosure.

[0037] In some embodiments, the present disclosure pertains to a chirally controlled oligonucleotide composition comprising a CpG oligonucleotide comprising a strand comprising about 14 to about 49 nucleotides, wherein the strand comprises at least one copy of CpG region motif N₁-(*R/S)-C-(*R/S)-G-(*R/S)-N₂, wherein at least one (*R/S) is a modified internucleotidic linkage in the Rp conformation and at least one (*R/S) is a modified internucleotidic linkage in the Sp conformation, and each of N₁ and N₂ is independently any nucleoside.

[0038] In some embodiments, the present disclosure pertains to a chirally controlled oligonucleotide composition comprising a CpG oligonucleotide comprising a strand comprising about 14 to about 49 nucleotides, wherein the strand comprises at least one copy of CpG region motif N₁-(*R/S)-C-(*R/S)-G-(*R/S)-N₂, wherein at least one (*R/S) is a phosphorothioate in the Rp conformation and at least one (*R/S) is a phosphorothioate in the Sp conformation, and each of N₁ and N₂ is independently any nucleoside.

[0039] In some embodiments, the present disclosure pertains to a composition comprising a CpG oligonucleotide comprising a strand comprising about 14 to about 49 nucleotides, wherein the strand comprises at least one copy of CpG region motif N₁-(*R/S)-C-(*R/S)-G-(*R/S)-N₂, wherein at least one (*R/S) is a phosphorothioate in the Rp conformation and at least one (*R/S) is a phosphorothioate in the Sp conformation, and each of N₁ and N₂ is independently any nucleoside.

[0040] In some embodiments, the present disclosure pertains to a composition comprising a plurality of oligonucleotides, each of which: (a) hybridizes with a particular target sequence; and (b) comprises a sequence that includes at least one CpG region motif present in all oligonucleotides of the plurality (a “common CpG region motif”), which CpG region motif has a structure: N₁-(*R/S)-C-(*R/S)-G-(*R/S)-N₂; wherein each (*R/S) is independently a chiral internucleotidic linkage, and each of N₁ and N₂ is independently any nucleoside.

[0041] In some embodiments, the present disclosure pertains to a composition comprising a plurality of oligonucleotides, each of which: (a) consists of a particular base sequence; and (b) comprises a sequence that includes at least one CpG region motif present in all oligonucleotides of the plurality (a “common CpG region motif”), which CpG region motif has a structure: N₁-(*R/S)-C-(*R/S)-G-(*R/S)-N₂; wherein at least one (*R/S) is a phosphorothioate in the Rp conformation and at least one (*R/S) is a phosphorothioate in the Sp conformation, and each of N₁ and N₂ is independently any nucleoside.

[0042] In some embodiments, the present disclosure pertains to a composition comprising a plurality of oligonucleotides, each of which: (a) hybridizes with a particular target sequence; and (b) has a sequence that includes at least one CpG region motif present in all oligonucleotides of the plurality (a “common CpG region motif”), which CpG region motif has a structure: N₁-(*R/S)-C-(*R/S)-G-(*R/S)-N₂; wherein each (*R/S) is independently a chiral internucleotidic linkage, wherein the composition is chirally controlled in that it contains a predetermined level of each of stereoisomers 1-8 (S1-S8) for each common CpG region motif: S1: N₁-(*R)-C-(*R)-G-(*R)-N₂; S2: N₁-(*R)-C-(*R)-G-(*S)-N₂; S3: N₁-(*R)-C-(*S)-G-(*R)-N₂; S4: N₁-(*R)-C-(*S)-G-(*S)-N₂; S5: N₁-(*S)-C-(*R)-G-(*R)-N₂; S6: N₁-(*S)-C-(*R)-G-(*S)-N₂; S7: N₁-(*S)-C-(*S)-G-(*R)-N₂; S8: N₁-(*S)-C-(*S)-G-(*S)-N₂.

[0043] In some embodiments, the present disclosure pertains to an oligonucleotide composition that is chirally controlled in that the composition comprises a predetermined level of oligonucleotides of an individual oligonucleotide type, wherein an oligonucleotide type is defined by: 1) base sequence; 2) pattern of backbone linkages; 3) pattern of backbone chiral centers; and 4) pattern of backbone phosphorus modifications; wherein each oligonucleotide of the individual oligonucleotide type independently comprises at least one common CpG region motif: N₁-(*R/S)-C-(*R/S)-G-(*R/S)-N₂; wherein each (*R/S) is independently a chiral internucleotidic linkage, and each of N₁ and N₂ is independently any nucleoside.

[0044] In some embodiments, the present disclosure pertains to a composition comprising a plurality of oligonucleotides, each of which: (a) hybridizes with a particular target sequence; (b) has a base sequence that includes at least one C residue in a CpG region motif that is present in all oligonucleotides of the plurality (a “common C residue”) and that has a 5-methyl group, a modified sugar moiety, or both; and (c) includes one or more chiral internucleotidic linkages, so that each oligonucleotide is a particular stereoform, characterized by its stereoidentity at each of the one or more chiral internucleotidic linkages, wherein stereoidentity identifies which stereoisomer is present at a particular chiral internucleotidic linkage, wherein the composition is chirally controlled in that it contains a predetermined level of each stereoform.

[0045] In some embodiments, the present disclosure pertains to an oligonucleotide composition that is chirally controlled in that the composition comprises a predetermined level of oligonucleotides of an individual oligonucleotide type, wherein an oligonucleotide type is defined by: 1) base sequence; 2) pattern of backbone linkages; 3) pattern of backbone chiral centers; and 4) pattern of backbone phosphorus modifications; wherein the base sequence includes at least one C residue in a CpG region motif that has a 5-methyl group, a modified sugar moiety, or both; and the composition has a reduced ability to activate a TLR9-mediated and/or TLR9-associated immune response relative to the ability of a composition that is not chirally controlled in that the composition comprises a random level of oligonucleotides of an individual oligonucleotide type.

[0046] In some embodiments, the present disclosure pertains to a chirally controlled oligonucleotide composition comprising a CpG oligonucleotide comprising a strand comprising about 14 to about 49 nucleotides, wherein the strand comprises at least one copy of any CpG region motif disclosed herein.

[0047] In some embodiments, the present disclosure pertains to a chirally controlled oligonucleotide composition comprising a CpG oligonucleotide comprising a strand comprising about 14 to about 49 nucleotides, wherein the strand comprises at least one copy of any CpG region motif of any CpG oligonucleotide disclosed herein.

[0048] In some embodiments, the present disclosure pertains to a chirally controlled oligonucleotide composition comprising a CpG oligonucleotide comprising a strand comprising about 14 to about 49 nucleotides, wherein the strand comprises or consists of the sequence of any oligonucleotide disclosed herein.

[0049] In some embodiments, the present disclosure pertains to a chirally controlled oligonucleotide composition comprising a CpG oligonucleotide comprising a strand comprising 14 to 49 nucleotides, wherein the strand comprises at least one copy of any CpG region motif disclosed herein.

[0050] In some embodiments, the present disclosure pertains to a chirally controlled oligonucleotide composition comprising a CpG oligonucleotide comprising a strand comprising 14 to 49 nucleotides, wherein the strand comprises at least one copy of any CpG region motif of any CpG oligonucleotide disclosed herein.

[0051] In some embodiments, the present disclosure pertains to a chirally controlled oligonucleotide composition comprising a CpG oligonucleotide comprising a strand comprising at least one copy of the CpG region motif T-(*R)-C-(*R)-G-(*R)-T, wherein the CpG oligonucleotide is capable of agonizing an immune response in the human.

[0052] In some embodiments, the present disclosure pertains to a chirally controlled oligonucleotide composition comprising a CpG oligonucleotide comprising a strand comprising at least one copy of the CpG region motif T-(*R)-C-(*R)-G-(*R)-T-(*R)-Py, wherein the CpG oligonucleotide is capable of agonizing an immune response in the human.

[0053] In some embodiments, the present disclosure pertains to a chirally controlled oligonucleotide composition comprising a CpG oligonucleotide comprising a strand comprising at least two non-adjacent copies of the CpG region motif of N₁-(*R)-C-(*R)-G-(*R)-N₂, wherein at least one phosphorothioate between the CpG region motifs is in the Sp conformation, and wherein the CpG oligonucleotide is capable of agonizing an immune response in the human.

[0054] In some embodiments, the present disclosure pertains to a chirally controlled oligonucleotide composition comprising a CpG oligonucleotide comprising a strand comprising at least one copy of the CpG region motif T-(*S)-C-(*S)-G-(*S)-T-(*S)-T, wherein the CpG oligonucleotide is capable of agonizing an immune response in the human.

[0055] In some embodiments, the present disclosure pertains to a chirally controlled oligonucleotide composition comprising a CpG oligonucleotide comprising a strand comprising at least one copy of the CpG region motif N₁-(*R/S)-C-(*R/S)-G-(*R/S)-N₂, wherein the CpG oligonucleotide is capable of agonizing an immune response in the human.

[0056] In some embodiments, the present disclosure pertains to a chirally controlled oligonucleotide composition comprising a CpG oligonucleotide comprising a strand comprising at least one copy of the CpG region motif N₁-(*R/S)-C-(*R/S)-G-(*R/S)-N₂, wherein at least one (*R/S) is (*R) and at least one (*R/S) is (*S), wherein the CpG oligonucleotide is capable of agonizing an immune response in the human.

[0057] In some embodiments, the present disclosure pertains to a chirally controlled oligonucleotide composition comprising a CpG oligonucleotide comprising a strand comprising at least one copy of the CpG region motif N₁-(*R/S)-C-(*R/S)-G-(*R/S)-N₂, wherein at least one (*R/S) is (*R) and at least one (*R/S) is (*S), and wherein C is unmethylated, wherein the CpG oligonucleotide is capable of agonizing an immune response in the human.

[0058] In some embodiments, the present disclosure pertains to a chirally controlled oligonucleotide composition comprising a CpG oligonucleotide comprising a strand comprising at least one copy of the CpG region motif N₁-(*R)-C-(*R)-G-(*S)-N₂, wherein the CpG oligonucleotide is capable of agonizing an immune response in the human.

[0059] In some embodiments, the present disclosure pertains to a chirally controlled oligonucleotide composition comprising a CpG oligonucleotide comprising a strand comprising at least one copy of the CpG region motif N₁-(*R)-C-(*S)-G-(*S)-N₂, wherein the CpG oligonucleotide is capable of agonizing an immune response in the human.

[0060] In some embodiments, the present disclosure pertains to a chirally controlled oligonucleotide composition comprising a CpG oligonucleotide comprising a strand comprising at least one copy of the CpG region motif N₁-(*R)-C-(*S)-G-(*R)-N₂, wherein the CpG oligonucleotide is capable of agonizing an immune response in the human.

[0061] In some embodiments, the present disclosure pertains to a chirally controlled oligonucleotide composition comprising a CpG oligonucleotide comprising a strand comprising at least one copy of the CpG region motif N₁-(*S)-C-(*R)-G-(*S)-N₂, wherein the CpG oligonucleotide is capable of agonizing an immune response in the human.

[0062] In some embodiments, the present disclosure pertains to a chirally controlled oligonucleotide composition comprising a CpG oligonucleotide comprising a strand comprising at least one copy of the CpG region motif N₁-(*S)-C-(*R)-G-(*R)-N₂, wherein the CpG oligonucleotide is capable of agonizing an immune response in the human.

[0063] In some embodiments, the present disclosure pertains to a chirally controlled oligonucleotide composition comprising a CpG oligonucleotide comprising a strand comprising at least one copy of the CpG region motif N₁-(*S)-C-(*S)-G-(*R)-N₂, wherein the CpG oligonucleotide is capable of agonizing an immune response in the human.

[0064] In some embodiments, the present disclosure pertains to a chirally controlled oligonucleotide composition comprising a CpG oligonucleotide comprising a strand comprising at least one copy of the CpG region motif Py-(*R/S)-C-(*R/S)-G-(*R/S)-Py, wherein at least one (*R/S) is (*R) and at least one (*R/S) is (*S), and wherein C is unmethylated, wherein the CpG oligonucleotide is capable of agonizing an immune response in the human.

[0065] In some embodiments, the present disclosure pertains to a chirally controlled oligonucleotide composition comprising a CpG oligonucleotide comprising a strand comprising at least one copy of the CpG region motif m5C-(*R)-m5C-(*R)-G-(*R)-N₁, where all the nucleosides are 2′-MOE, wherein the CpG oligonucleotide is capable of agonizing an immune response in the human.

[0066] In some embodiments, the present disclosure pertains to a chirally controlled oligonucleotide composition comprising a CpG oligonucleotide comprising a strand comprising at least one copy of the CpG region motif m5C-(*R)-m5C-(*R)-G-(*R)-Py, where all the nucleosides are 2′-MOE, wherein the CpG oligonucleotide is capable of agonizing an immune response in the human.

[0067] In some embodiments, the present disclosure pertains to a chirally controlled oligonucleotide composition comprising a CpG oligonucleotide comprising a strand comprising at least one copy of the CpG region motif N₁-(*R)-m5C-(*R)-G-(*R)-N₂, wherein N₁ is methylated or not methylated, and all the nucleosides are 2′-MOE, wherein the CpG oligonucleotide is capable of agonizing an immune response in the human.

[0068] In some embodiments, the present disclosure pertains to a chirally controlled oligonucleotide composition comprising a CpG oligonucleotide comprising a strand comprising at least one copy of the CpG region motif N₁-(*R)-m5C-(*R)-G-(*R)-Py, wherein N₁ is methylated or not methylated, and all the nucleosides are 2′-MOE, wherein the CpG oligonucleotide is capable of agonizing an immune response in the human.

[0069] In some embodiments, the present disclosure pertains to a chirally controlled oligonucleotide composition comprising a CpG oligonucleotide comprising a strand comprising at least one copy of the CpG region motif N₁-(*R/S)-m5C-(*R/S)-G-(*R/S)-N₂, wherein at least 2 of the (*R/S) are (*R), all the nucleosides are 2′-MOE, and N₁ and N₂ are methylated or not methylated, wherein the CpG oligonucleotide is capable of agonizing an immune response in the human.

[0070] In some embodiments, the present disclosure pertains to a chirally controlled oligonucleotide composition comprising a CpG oligonucleotide comprising a strand comprising at least one copy of the CpG region motif N₁-(*R/S)-m5C-(*R/S)-G-(*R/S)-N₂, wherein at least 2 of the (*R/S) are (*R), all the nucleosides are 2′-MOE; and N₁ and N₂ are methylated or not methylated, wherein the CpG oligonucleotide is capable of agonizing an immune response in the human.

[0071] In some embodiments, the present disclosure pertains to a chirally controlled oligonucleotide composition comprising a CpG oligonucleotide comprising a strand comprising at least one copy of the CpG region motif N₁-(*S)-[C]-(*R)-[G]-(*S)-N₂, where N₁ is 2′H, 2′-MOE or 2′-OMe; [C] is C, m5C, 2′-MOE C, or 2′-MOE m5C; [G] is G, 2′-Ome G, or 2′-MOE G; and N₂ is 2′H, 2′-MOE or 2′-OMe, wherein the CpG oligonucleotide is capable of antagonizing an immune response in the human.

[0072] In some embodiments, the present disclosure pertains to a chirally controlled oligonucleotide composition comprising a CpG oligonucleotide comprising a strand comprising at least one copy of the CpG region motif N₁-(*S)-[C]-(*R)-[G]-(*S)-N₂, where N₁ is 2′H; [C] is C, m5C, 2′-MOE C, or 2′-MOE m5C; [G] is G, 2′-Ome G, or 2′-MOE G; and N₂ is 2′H, wherein the CpG oligonucleotide is capable of antagonizing an immune response in the human.

[0073] In some embodiments, the present disclosure pertains to a chirally controlled oligonucleotide composition comprising a CpG oligonucleotide comprising a strand comprising at least one copy of the CpG region motif N₁-(*R)-[C]-(*R)-[G]-(*R)-Py, where N₁ and Py are 2′H, 2′-MOE or 2′OMe; and [C] is C or 2′-MOE C; and [G] is G or 2′-MOE G; and Py is 2′-H or 2′-MOE, wherein the CpG oligonucleotide is capable of antagonizing an immune response in the human.

[0074] In some embodiments, the present disclosure pertains to a chirally controlled oligonucleotide composition comprising a CpG oligonucleotide comprising a strand comprising at least one copy of the CpG region motif N₁-(*R)-[C]-(*R)-[G]-(*R)-N₂, where N₁ and N₂ are 2′H, 2′-MOE or 2′OMe; and [C] is 2′-MOE m5C; N₂ is 2′-H or 2′-MOE, wherein the CpG oligonucleotide is capable of antagonizing an immune response in the human.

[0075] In some embodiments, the present disclosure pertains to a chirally controlled oligonucleotide composition comprising a CpG oligonucleotide comprising a strand comprising at least one copy of the CpG region motif Py-(*R)-C-(*R)-G-(*R)-Py, wherein the CpG oligonucleotide is capable of antagonizing an immune response in the human.

[0076] In some embodiments, the present disclosure pertains to a chirally controlled oligonucleotide composition comprising a CpG oligonucleotide comprising a strand comprising at least one copy of the CpG region motif Py-(*R)-C-(*R)-G-(*R)-Py, wherein the CpG oligonucleotide is capable of antagonizing an immune response in the human.

[0077] In some embodiments, the present disclosure pertains to a chirally controlled oligonucleotide composition comprising a CpG oligonucleotide comprising a strand comprising at least one copy of the CpG region motif Py-(*S)-C-(*R)-G-(*S)-Py.

[0078] In some embodiments, the present disclosure pertains to a chirally controlled oligonucleotide composition comprising a CpG oligonucleotide comprising a strand comprising at least one copy of the CpG region motif Py-(*S)-C-(*S)-G-(*S)-Py, wherein the CpG oligonucleotide is capable of antagonizing an immune response in the human.

[0079] In some embodiments, the present disclosure pertains to a chirally controlled oligonucleotide composition comprising a CpG oligonucleotide comprising a strand comprising at least one copy of the CpG region motif Py-(*R)-[C]-(*R)-[G]-(*R)-Py, where [C] is 2′-MOE C; and [G] is 2′-MOE G, wherein the CpG oligonucleotide is capable of antagonizing an immune response in the human.

[0080] In some embodiments, the present disclosure pertains to a chirally controlled oligonucleotide composition comprising a CpG oligonucleotide comprising a strand comprising at least one copy of the CpG region motif Py-(*R)-[C]-(*R)-[G]-(*S)-Py, where [C] is 2′-MOE C; and [G] is 2′-MOE G, wherein the CpG oligonucleotide is capable of antagonizing an immune response in the human.

[0081] In some embodiments, the present disclosure pertains to a chirally controlled oligonucleotide composition comprising a CpG oligonucleotide comprising a strand comprising at least one copy of the CpG region motif Py-(*R)-[C]-(*R)-G-(*R)-Py, where [C] is C, 2′-OMe m5C, or 2′-MOE C, wherein the CpG oligonucleotide is capable of antagonizing an immune response in the human.

[0082] In some embodiments, the present disclosure pertains to a chirally controlled oligonucleotide composition comprising a CpG oligonucleotide comprising a strand comprising at least one copy of the CpG region motif Py-(*R)-[C]-(*R)-[G]-(*R)-N₁, where [C] is 2′-OMe m5C, and [G] is 2′-OMe G, and N₁ is 2′-OMe, wherein the CpG oligonucleotide is capable of antagonizing an immune response in the human.

[0083] In some embodiments, the present disclosure pertains to a chirally controlled oligonucleotide composition comprising a CpG oligonucleotide comprising a strand comprising at least one copy of the CpG region motif Py-(*R)-[C]-(*R)-[G]-(*R)-Py, where [C] is 2′-OMe m5C, and [G] is 2′-OMe G, wherein the CpG oligonucleotide is capable of antagonizing an immune response in the human.

[0084] In some embodiments, the present disclosure pertains to a chirally controlled oligonucleotide composition comprising a CpG oligonucleotide comprising a strand comprising at least one copy of the CpG region motif Py-(*R)-[C]-(*R)-[G]-(*R)-Py, where [C] is 2′-OMe C and [G] is 2′-OMe G, wherein the CpG oligonucleotide is capable of antagonizing an immune response in the human.

[0085] In some embodiments, the present disclosure pertains to a chirally controlled oligonucleotide composition comprising a CpG oligonucleotide comprising a strand comprising at least one copy of the CpG region motif Py-(*S)-[C]-(*R)-[G]-(*S)-Py, where [C] is 2′-MOE C and [G] is 2′-MOE G, wherein the CpG oligonucleotide is capable of antagonizing an immune response in the human.

[0086] In some embodiments, the present disclosure pertains to a chirally controlled oligonucleotide composition comprising a CpG oligonucleotide comprising a strand comprising at least one copy of the CpG region motif Py-(*R)-m5C-(*R)-G-(*R)-Py, wherein the CpG oligonucleotide is capable of antagonizing an immune response in the human.

[0087] In some embodiments, the present disclosure pertains to a chirally controlled oligonucleotide composition comprising a CpG oligonucleotide comprising a strand comprising at least one copy of the CpG region motif Py-(*R)-m5C-(*R)-G-(*R)-Py, wherein the CpG oligonucleotide is capable of antagonizing an immune response in the human.

[0088] In some embodiments, the present disclosure pertains to a chirally controlled oligonucleotide composition comprising a CpG oligonucleotide comprising a strand comprising at least one copy of the CpG region motif Py-(*S)-m5C-(*R)-G-(*S)-Py, wherein the CpG oligonucleotide is capable of antagonizing an immune response in the human.

[0089] In some embodiments, the present disclosure pertains to a chirally controlled oligonucleotide composition comprising a CpG oligonucleotide comprising a strand comprising at least one copy of the CpG region motif Py-(*S)-[C]-(*R)-[G]-(*S)-Py, where [C] is 2′-MOE m5C and [G] is 2′-MOE G, wherein the CpG oligonucleotide is capable of antagonizing an immune response in the human.

[0090] In some embodiments, the present disclosure pertains to a chirally controlled oligonucleotide composition comprising a CpG oligonucleotide comprising a strand comprising at least one copy of the CpG region motif Py-(*S)-[C]-(*R)-[G]-(*S)-Py, where [C] is 2′-OMe m5C and [G] is 2′-OMe G, wherein the CpG oligonucleotide is capable of antagonizing an immune response in the human.

[0091] In some embodiments, the present disclosure pertains to a chirally controlled oligonucleotide composition comprising a CpG oligonucleotide comprising a strand comprising at least one copy of the CpG region motif Py-(*S)-[C]-(*R)-[G]-(*S)-Py, where [C] is 2′-OMe C and [G] is 2′-OMe G, wherein the CpG oligonucleotide is capable of antagonizing an immune response in the human.

[0092] In some embodiments, the present disclosure pertains to a chirally controlled oligonucleotide composition comprising a CpG oligonucleotide comprising a strand comprising at least one copy of the CpG region motif Py-(*R)-[C]-(*R)-[G]-(*R)-Py, where both [C] and [G] are 2′-modified, wherein the CpG oligonucleotide is capable of antagonizing an immune response in the human.

[0093] In some embodiments, the present disclosure pertains to a chirally controlled oligonucleotide composition comprising a CpG oligonucleotide comprising a strand comprising at least one copy of the CpG region motif N₁-(*R)-[C]-(*R)-[G]-(*R)-N₂, where both [C] and [G] are 2′-modified, wherein the CpG oligonucleotide is capable of antagonizing an immune response in the human.

[0094] In some embodiments, the present disclosure pertains to a chirally controlled oligonucleotide composition comprising a CpG oligonucleotide comprising a strand comprising at least one copy of the CpG region motif T-(*R)-C-(*R)-G-(*R)-T.

[0095] In some embodiments, the present disclosure pertains to a chirally controlled oligonucleotide composition comprising a CpG oligonucleotide comprising a strand comprising at least one copy of the CpG region motif T-(*R)-C-(*R)-G-(*R)-T-(*R)-Py.

[0096] In some embodiments, the present disclosure pertains to a chirally controlled oligonucleotide composition comprising a CpG oligonucleotide comprising a strand comprising at least two non-adjacent copies of the CpG region motif of N₁-(*R)-C-(*R)-G-(*R)-N₂, wherein at least one phosphorothioate between the CpG region motifs is in the Sp conformation.

[0097] In some embodiments, the present disclosure pertains to a chirally controlled oligonucleotide composition comprising a CpG oligonucleotide comprising a strand comprising at least one copy of the CpG region motif T-(*S)-C-(*S)-G-(*S)-T-(*S)-T.

[0098] In some embodiments, the present disclosure pertains to a chirally controlled oligonucleotide composition comprising a CpG oligonucleotide comprising a strand comprising at least one copy of the CpG region motif N₁-(*R/S)-C-(*R/S)-G-(*R/S)-N₂.

[0099] In some embodiments, the present disclosure pertains to a chirally controlled oligonucleotide composition comprising a CpG oligonucleotide comprising a strand comprising at least one copy of the CpG region motif N₁-(*R/S)-C-(*R/S)-G-(*R/S)-N₂, wherein at least one (*R/S) is (*R) and at least one (*R/S) is (*S).

[0100] In some embodiments, the present disclosure pertains to a chirally controlled oligonucleotide composition comprising a CpG oligonucleotide comprising a strand comprising at least one copy of the CpG region motif N₁-(*R/S)-C-(*R/S)-G-(*R/S)-N₂, wherein at least one (*R/S) is (*R) and at least one (*R/S) is (*S), and wherein C is unmethylated.

[0101] In some embodiments, the present disclosure pertains to a chirally controlled oligonucleotide composition comprising a CpG oligonucleotide comprising a strand comprising at least one copy of the CpG region motif N₁-(*R)-C-(*R)-G-(*S)-N₂.

[0102] In some embodiments, the present disclosure pertains to a chirally controlled oligonucleotide composition comprising a CpG oligonucleotide comprising a strand comprising at least one copy of the CpG region motif N₁-(*R)-C-(*S)-G-(*S)-N₂.

[0103] In some embodiments, the present disclosure pertains to a chirally controlled oligonucleotide composition comprising a CpG oligonucleotide comprising a strand comprising at least one copy of the CpG region motif N₁-(*R)-C-(*S)-G-(*R)-N₂.

[0104] In some embodiments, the present disclosure pertains to a chirally controlled oligonucleotide composition comprising a CpG oligonucleotide comprising a strand comprising at least one copy of the CpG region motif N₁-(*S)-C-(*R)-G-(*S)-N₂.

[0105] In some embodiments, the present disclosure pertains to a chirally controlled oligonucleotide composition comprising a CpG oligonucleotide comprising a strand comprising at least one copy of the CpG region motif N₁-(*S)-C-(*R)-G-(*R)-N₂.

[0106] In some embodiments, the present disclosure pertains to a chirally controlled oligonucleotide composition comprising a CpG oligonucleotide comprising a strand comprising at least one copy of the CpG region motif N₁-(*S)-C-(*S)-G-(*R)-N₂.

[0107] In some embodiments, the present disclosure pertains to a chirally controlled oligonucleotide composition comprising a CpG oligonucleotide comprising a strand comprising at least one copy of the CpG region motif Py-(*R/S)-C-(*R/S)-G-(*R/S)-Py, wherein at least one (*R/S) is (*R) and at least one (*R/S) is (*S), and wherein C is unmethylated.

[0108] In some embodiments, the present disclosure pertains to a chirally controlled oligonucleotide composition comprising a CpG oligonucleotide comprising a strand comprising at least one copy of the CpG region motif m5C-(*R)-m5C-(*R)-G-(*R)-N₁, where all the nucleosides are 2′-MOE.

[0109] In some embodiments, the present disclosure pertains to a chirally controlled oligonucleotide composition comprising a CpG oligonucleotide comprising a strand comprising at least one copy of the CpG region motif m5C-(*R)-m5C-(*R)-G-(*R)-Py, where all the nucleosides are 2′-MOE.

[0110] In some embodiments, the present disclosure pertains to a chirally controlled oligonucleotide composition comprising a CpG oligonucleotide comprising a strand comprising at least one copy of the CpG region motif N₁-(*R)-m5C-(*R)-G-(*R)-N₂, wherein N₁ is methylated or not methylated, and all the nucleosides are 2′-MOE.

[0111] In some embodiments, the present disclosure pertains to a chirally controlled oligonucleotide composition comprising a CpG oligonucleotide comprising a strand comprising at least one copy of the CpG region motif N₁-(*R)-m5C-(*R)-G-(*R)-Py, wherein N₁ is methylated or not methylated, and all the nucleosides are 2′-MOE.

[0112] In some embodiments, the present disclosure pertains to a chirally controlled oligonucleotide composition comprising a CpG oligonucleotide comprising a strand comprising at least one copy of the CpG region motif N₁-(*R/S)-m5C-(*R/S)-G-(*R/S)-N₂, wherein at least 2 of the (*R/S) are (*R), all the nucleosides are 2′-MOE, and N₁ and N₂ are methylated or not methylated.

[0113] In some embodiments, the present disclosure pertains to a chirally controlled oligonucleotide composition comprising a CpG oligonucleotide comprising a strand comprising at least one copy of the CpG region motif N₁-(*R/S)-m5C-(*R/S)-G-(*R/S)-N₂, wherein at least 2 of the (*R/S) are (*R), all the nucleosides are 2′-MOE; and N₁ and N₂ are methylated or not methylated.

[0114] In some embodiments, the present disclosure pertains to a chirally controlled oligonucleotide composition comprising a CpG oligonucleotide comprising a strand comprising at least one copy of the CpG region motif N₁-(*S)-[C]-(*R)-[G]-(*S)-N₂, where N₁ is 2′H, 2′-MOE or 2′-OMe; [C] is C, m5C, 2′-MOE C, or 2′-MOE m5C; [G] is G, 2′-Ome G, or 2′-MOE G; and N₂ is 2′H, 2′-MOE or 2′-OMe.

[0115] In some embodiments, the present disclosure pertains to a chirally controlled oligonucleotide composition comprising a CpG oligonucleotide comprising a strand comprising at least one copy of the CpG region motif N₁-(*S)-[C]-(*R)-[G]-(*S)-N₂, where N₁ is 2′H; [C] is C, m5C, 2′-MOE C, or 2′-MOE m5C; [G] is G, 2′-Ome G, or 2′-MOE G; and N₂ is 2′H.

[0116] In some embodiments, the present disclosure pertains to a chirally controlled oligonucleotide composition comprising a CpG oligonucleotide comprising a strand comprising at least one copy of the CpG region motif N₁-(*R)-[C]-(*R)-[G]-(*R)-Py, where N₁ and Py are 2′H, 2′-MOE or 2′OMe; and [C] is C or 2′-MOE C; and [G] is G or 2′-MOE G; and Py is 2′-H or 2′-MOE.

[0117] In some embodiments, the present disclosure pertains to a chirally controlled oligonucleotide composition comprising a CpG oligonucleotide comprising a strand comprising at least one copy of the CpG region motif N₁-(*R)-[C]-(*R)-[G]-(*R)-N₂, where N₁ and N₂ are 2′H, 2′-MOE or 2′OMe; and [C] is 2′-MOE m5C; N₂ is 2′-H or 2′-MOE.

[0118] In some embodiments, the present disclosure pertains to a chirally controlled oligonucleotide composition comprising a CpG oligonucleotide comprising a strand comprising at least one copy of the CpG region motif Py-(*R)-C-(*R)-G-(*R)-Py.

[0119] In some embodiments, the present disclosure pertains to a chirally controlled oligonucleotide composition comprising a CpG oligonucleotide comprising a strand comprising at least one copy of the CpG region motif Py-(*R)-C-(*R)-G-(*R)-Py.

[0120] In some embodiments, the present disclosure pertains to a chirally controlled oligonucleotide composition comprising a CpG oligonucleotide comprising a strand comprising at least one copy of the CpG region motif Py-(*S)-C-(*R)-G-(*S)-Py.

[0121] In some embodiments, the present disclosure pertains to a chirally controlled oligonucleotide composition comprising a CpG oligonucleotide comprising a strand comprising at least one copy of the CpG region motif Py-(*S)-C-(*S)-G-(*S)-Py.

[0122] In some embodiments, the present disclosure pertains to a chirally controlled oligonucleotide composition comprising a CpG oligonucleotide comprising a strand comprising at least one copy of the CpG region motif Py-(*R)-[C]-(*R)-[G]-(*R)-Py, where [C] is 2′-MOE C; and [G] is 2′-MOE G.

[0123] In some embodiments, the present disclosure pertains to a chirally controlled oligonucleotide composition comprising a CpG oligonucleotide comprising a strand comprising at least one copy of the CpG region motif Py-(*R)-[C]-(*R)-[G]-(*S)-Py, where [C] is 2′-MOE C; and [G] is 2′-MOE G.

[0124] In some embodiments, the present disclosure pertains to a chirally controlled oligonucleotide composition comprising a CpG oligonucleotide comprising a strand comprising at least one copy of the CpG region motif Py-(*R)-[C]-(*R)-G-(*R)-Py, where [C] is C, 2′-OMe m5C, or 2′-MOE C.

[0125] In some embodiments, the present disclosure pertains to a chirally controlled oligonucleotide composition comprising a CpG oligonucleotide comprising a strand comprising at least one copy of the CpG region motif Py-(*R)-[C]-(*R)-[G]-(*R)-N₁, where [C] is 2′-OMe m5C, and [G] is 2′-OMe G, and N₁ is 2′-OMe.

[0126] In some embodiments, the present disclosure pertains to a chirally controlled oligonucleotide composition comprising a CpG oligonucleotide comprising a strand comprising at least one copy of the CpG region motif Py-(*R)-[C]-(*R)-[G]-(*R)-Py, where [C] is 2′-OMe m5C, and [G] is 2′-OMe G.

[0127] In some embodiments, the present disclosure pertains to a chirally controlled oligonucleotide composition comprising a CpG oligonucleotide comprising a strand comprising at least one copy of the CpG region motif Py-(*R)-[C]-(*R)-[G]-(*R)-Py, where [C] is 2′-OMe C and [G] is 2′-OMe G.

[0128] In some embodiments, the present disclosure pertains to a chirally controlled oligonucleotide composition comprising a CpG oligonucleotide comprising a strand comprising at least one copy of the CpG region motif Py-(*S)-[C]-(*R)-[G]-(*S)-Py, where [C] is 2′-MOE C and [G] is 2′-MOE G.

[0129] In some embodiments, the present disclosure pertains to a chirally controlled oligonucleotide composition comprising a CpG oligonucleotide comprising a strand comprising at least one copy of the CpG region motif Py-(*R)-m5C-(*R)-G-(*R)-Py.

[0130] In some embodiments, the present disclosure pertains to a chirally controlled oligonucleotide composition comprising a CpG oligonucleotide comprising a strand comprising at least one copy of the CpG region motif Py-(*R)-m5C-(*R)-G-(*R)-Py.

[0131] In some embodiments, the present disclosure pertains to a chirally controlled oligonucleotide composition comprising a CpG oligonucleotide comprising a strand comprising at least one copy of the CpG region motif Py-(*S)-m5C-(*R)-G-(*S)-Py.

[0132] In some embodiments, the present disclosure pertains to a chirally controlled oligonucleotide composition comprising a CpG oligonucleotide comprising a strand comprising at least one copy of the CpG region motif Py-(*S)-[C]-(*R)-[G]-(*S)-Py, where [C] is 2′-MOE m5C and [G] is 2′-MOE G.

[0133] In some embodiments, the present disclosure pertains to a chirally controlled oligonucleotide composition comprising a CpG oligonucleotide comprising a strand comprising at least one copy of the CpG region motif Py-(*S)-[C]-(*R)-[G]-(*S)-Py, where [C] is 2′-OMe m5C and [G] is 2′-OMe G.

[0134] In some embodiments, the present disclosure pertains to a chirally controlled oligonucleotide composition comprising a CpG oligonucleotide comprising a strand comprising at least one copy of the CpG region motif Py-(*S)-[C]-(*R)-[G]-(*S)-Py, where [C] is 2′-OMe C and [G] is 2′-OMe G.

[0135] In some embodiments, the present disclosure pertains to a chirally controlled oligonucleotide composition comprising a CpG oligonucleotide comprising a strand comprising at least one copy of the CpG region motif Py-(*R)-[C]-(*R)-[G]-(*R)-Py, where both [C] and [G] are 2′-modified.

[0136] In some embodiments, the present disclosure pertains to a chirally controlled oligonucleotide composition comprising a CpG oligonucleotide comprising a strand comprising at least one copy of the CpG region motif N₁-(*R)-[C]-(*R)-[G]-(*R)-N₂, where both [C] and [G] are 2′-modified.

[0137] In some embodiments of the methods and compositions of the present disclosure, a CpG oligonucleotide comprises two or more CpG region motifs described herein.

[0138] In some embodiments, the present disclosure pertains to the composition of any one of the preceding embodiments, wherein at least one internucleotidic linkage is a phosphorodithioate.

[0139] In some embodiments, the present disclosure pertains to the composition of any one of the preceding embodiments, wherein at least one internucleotidic linkage is selected from: phosphorodithioate, phosphoramidate, boranophosphonate, an amide linker, or a compound of formula (I):

[chemical structure]

where R³ is selected from OH, SH, NH₂, BH₃, CH₃, C₁₋₆ alkyl, C₆₋₁₀ aryl, C₁₋₆ alkoxy and C₆₋₁₀ aryl-oxy, wherein C₁₋₆ alkyl and C₆₋₁₀ aryl are unsubstituted or optionally independently substituted with 1 to 3 groups independently selected from halo, hydroxyl and NH₂, and applicable salts thereof; and R⁴ is selected from O, S, NH, or CH₂.

[0140] In some embodiments, the present disclosure pertains to the composition of any one of the preceding embodiments, wherein at least one internucleotidic linkage is selected from:

| Symbol | Modified Internucleotidic Linkage |
|---|---|
| s | phosphorothioate [chemical structure] |
| s1 | [chemical structure] |
| s2 | [chemical structure] |
| s3 | [chemical structure] |
| s4 | [chemical structure] |
| s5 | [chemical structure] |
| s6 | [chemical structure] |
| s7 | [chemical structure] |
| s8 | [chemical structure] |
| s9 | [chemical structure] |
| s10 | [chemical structure] |
| s11 | [chemical structure] |
| s12 | [chemical structure] |
| s13 | [chemical structure] |
| s14 | [chemical structure] |
| s15 | [chemical structure] |
| s16 | [chemical structure] |
| s17 | [chemical structure] |
| s18 | [chemical structure] |

[0141] In some embodiments, the present disclosure pertains to a method of agonizing an immune response in a human cell, the method comprising the step of contacting the human cell with a CpG oligonucleotide composition of any one of the preceding embodiments, wherein the CpG oligonucleotide is capable of agonizing a TLR9-mediated or TLR9-associated immune response.

[0142] In some embodiments, the present disclosure pertains to a method of antagonizing an immune response in a human cell, the method comprising the step of contacting the human cell with a CpG oligonucleotide composition of any one of the preceding embodiments, wherein the CpG oligonucleotide is capable of antagonizing a TLR9-mediated or TLR9-associated immune response.

[0143] In some embodiments, the present disclosure pertains to a method of modulating an immune response in a subject, the method comprising the step of administering a composition of any one of preceding embodiments, wherein the CpG oligonucleotide is capable of modulating a TLR9-mediated or TLR9-associated immune response.

[0144] In some embodiments, the present disclosure pertains to a method of agonizing an immune response in a human being in need thereof, the method comprising the step of contacting the human with an immunologically effective amount of CpG oligonucleotide composition of any one of the preceding embodiments.

[0145] In some embodiments, the present disclosure pertains to the method of any one of the preceding embodiments, wherein the human has a disease.

[0146] In some embodiments, the present disclosure pertains to the method of any one of the preceding embodiments, wherein the human has a disease amenable to treatment with an agonized immune response.

[0147] In some embodiments, the present disclosure pertains to the method of any one of the preceding embodiments, wherein the human has a disease selected from an infectious disease, a genetic disease, and cancer.

[0148] In some embodiments, the present disclosure pertains to a method of increasing an immune response to an immunologically active component in a subject, comprising administering an immunologically effective amount of (a) a composition of any one of the preceding embodiments and (b) the immunologically active component.

[0149] In some embodiments, the present disclosure pertains to the composition of any one of the preceding embodiments, wherein the immunologically active component is selected from: an immunogen, an antigen, a toxin, a virus, a bacterium, a fungus, an infectious agent, a cancer antigen, a pathogen, and a component thereof.

[0150] In some embodiments, the present disclosure pertains to a method of identifying a second oligonucleotide composition with decreased immune stimulation in a subject compared to a first oligonucleotide composition, the method comprising steps of: (a) measuring the immune stimulation mediated by the first oligonucleotide composition, wherein the first oligonucleotide composition comprising oligonucleotides that have a common base sequence comprising at least one CpG region; (b) measuring the immune stimulation mediated by a second oligonucleotide composition, wherein the second oligonucleotide composition has the same common base sequence as the first oligonucleotide composition, and wherein the CpG region of oligonucleotides of the second composition differs in its pattern of chiral centers from the corresponding region of oligonucleotides of the first oligonucleotide composition; (c) optionally repeating step (b), each repeat with a different second oligonucleotide composition, and selecting a second oligonucleotide composition which mediates less immune stimulation than the first oligonucleotide composition. In some embodiments of the methods and compositions of the present disclosure, a CpG oligonucleotide comprises two or more CpG region motifs described herein.

[0151] In some embodiments, the present disclosure pertains to the method of any one of the preceding embodiments, wherein the first oligonucleotide is immunostimulatory in a human cell.

[0152] In some embodiments, the present disclosure pertains to the method of any one of the preceding embodiments, wherein the second oligonucleotide comprises at least one phosphorothioate in the Sp conformation and at least one phosphorothioate in the Rp conformation in the CpG region motif.

[0153] In some embodiments, the present disclosure pertains to the method of any one of the preceding embodiments, wherein the second oligonucleotide does not comprise an agonistic CpG region motif described herein.

[0154] In some embodiments, the present disclosure pertains to the method of any one of the preceding embodiments, wherein the second oligonucleotide does not comprise an antagonistic CpG region motif described herein.

[0155] In some embodiments, the present disclosure pertains to the method of any one of the preceding embodiments, wherein the second oligonucleotide does not comprise an agonistic or antagonistic CpG region motif described herein.

[0156] In some embodiments, the present disclosure pertains to a method of improving a characteristic of a CpG oligonucleotide composition comprising at least two CpG oligonucleotides, wherein the method comprises a step of: decreasing the amount in the composition of at least one of the at least two CpG oligonucleotides, wherein each of the at least two CpG oligonucleotides is defined by the stereochemistry of a CpG region motif, and wherein the at least one of the at least two CpG oligonucleotides is determined to have an inferior characteristic relative to the CpG oligonucleotide composition.

[0157] In some embodiments, the present disclosure pertains to a method of improving a characteristic of a stereorandom CpG oligonucleotide composition, wherein the method comprises a step of: decreasing the amount in the composition of at least one of the at least two CpG oligonucleotides, wherein each of the at least two CpG oligonucleotides is defined by the stereochemistry of a CpG region motif, and wherein the at least one of the at least two CpG oligonucleotides is determined to have an inferior characteristic relative to the CpG oligonucleotide composition, wherein the characteristic is increased activity, improved efficacy, reduced toxicity, increased stability, increased delivery, or increased biological half-life.

[0158] In some embodiments, the present disclosure pertains to a method of designing a second oligonucleotide mediating decreased immune stimulation in a human cell relative to the immune stimulation mediated by a first oligonucleotide, the method comprising the steps of: (a) measuring the immune stimulation mediated by a first oligonucleotide, wherein the first oligonucleotide has a defined base sequence comprising at least one CpG region; (b) measuring the immune stimulation mediated by one or more second oligonucleotides, wherein the second oligonucleotides have the same base sequence as the first oligonucleotide and further comprise one or more phosphorothioates in the CpG region motif, wherein the stereochemistry of the phosphorothioates in the CpG region motif of the second oligonucleotides differs from the stereochemistry of any phosphorothioates in the CpG region motif of the first oligonucleotides, wherein steps (a) and (b) can be performed in any order; (c) selecting a second oligonucleotide which mediates less immune stimulation than the first oligonucleotide.

[0159] In some embodiments, the present disclosure pertains to the method of any one of the preceding embodiments, wherein the first oligonucleotide is immunostimulatory in a human cell.

[0160] In some embodiments, the present disclosure pertains to the method of any one of the preceding embodiments, wherein the second oligonucleotide comprises at least one phosphorothioate in the Sp conformation and at least one phosphorothioate in the Rp conformation in the CpG region motif.

[0161] In some embodiments, the present disclosure pertains to the method of any one of the preceding embodiments, wherein the second oligonucleotide does not comprise an agonistic CpG region motif described herein.

[0162] In some embodiments, the present disclosure pertains to the method of any one of the preceding embodiments, wherein the second oligonucleotide does not comprise an antagonistic CpG region motif described herein.

[0163] In some embodiments, the present disclosure pertains to the method of any one of the preceding embodiments, wherein the second oligonucleotide does not comprise an agonistic or antagonistic CpG region motif described herein.

[0164] In some embodiments, the present disclosure pertains to a method of decreasing the immune stimulation in a human cell mediated by a first oligonucleotide, the method comprising the steps of: (a) providing the first oligonucleotide, wherein the first oligonucleotide has a defined base sequence comprising at least one CpG region; and measuring the immune stimulation in a human cell mediated by the first oligonucleotide; (b) providing one or more second oligonucleotides, wherein the second oligonucleotides have the same base sequence as the first oligonucleotide and further comprise one or more phosphorothioates in the CpG region, wherein the stereochemistry of the phosphorothioates in the CpG region of the second oligonucleotides differs from the stereochemistry of any phosphorothioates in the CpG region of the first oligonucleotides; and measuring the immune stimulation in a human cell of the second oligonucleotides, wherein steps (a) and (b) can be performed in any order; (c) selecting a second oligonucleotide which mediates less immune stimulation than the first oligonucleotide; and (d) contacting the cell with the second oligonucleotide.

[0165] In some embodiments, the present disclosure pertains to the method of any one of the preceding embodiments, wherein the first oligonucleotide is immunostimulatory in a human cell.

[0166] In some embodiments, the present disclosure pertains to the method of any one of the preceding embodiments, wherein the second oligonucleotide comprises at least one phosphorothioate in the Sp conformation and at least one phosphorothioate in the Rp conformation in the CpG region motif.

[0167] In some embodiments, the present disclosure pertains to the method of any one of the preceding embodiments, wherein the second oligonucleotide does not comprise an agonistic CpG region motif described herein.

[0168] In some embodiments, the present disclosure pertains to the method of any one of the preceding embodiments, wherein the second oligonucleotide does not comprise an antagonistic CpG region motif described herein.

[0169] In some embodiments, the present disclosure pertains to the method of any one of the preceding embodiments, wherein the second oligonucleotide does not comprise an agonistic or antagonistic CpG region motif described herein.

[0170] In some embodiments, the present disclosure pertains to a composition comprising an oligonucleotide, wherein the oligonucleotide mediates less immune stimulation than a reference oligonucleotide, wherein the second oligonucleotide is selected using a method comprising the steps of: (a) providing the reference oligonucleotide, wherein the reference oligonucleotide has a defined base sequence comprising at least one CpG region; and measuring the immune stimulation in a human cell mediated by the reference oligonucleotide; (b) providing one or more second oligonucleotides, wherein the second oligonucleotides have the same base sequence as the reference oligonucleotide and further comprise one or more phosphorothioates in the CpG region, wherein the stereochemistry of the phosphorothioates in the CpG region of the second oligonucleotides differs from the stereochemistry of any phosphorothioates in the CpG region of the reference oligonucleotides; and measuring the immune stimulation in a human cell of the second oligonucleotides, wherein steps (a) and (b) can be performed in any order; (c) selecting a second oligonucleotide which mediates less immune stimulation than the reference oligonucleotide.

[0171] In some embodiments, the present disclosure pertains to the method of any one of the preceding embodiments, wherein the reference oligonucleotide is immunostimulatory in a human cell.

[0172] In some embodiments, the present disclosure pertains to the method of any one of the preceding embodiments, wherein the second oligonucleotide comprises at least one phosphorothioate in the Sp conformation and at least one phosphorothioate in the Rp conformation in the CpG region motif.

[0173] In some embodiments, the present disclosure pertains to the method of any one of the preceding embodiments, wherein the second oligonucleotide does not comprise an agonistic CpG region motif described herein.

[0174] In some embodiments, the present disclosure pertains to the method of any one of the preceding embodiments, wherein the second oligonucleotide does not comprise an antagonistic CpG region motif described herein.

[0175] In some embodiments, the present disclosure pertains to the method of any one of the preceding embodiments, wherein the second oligonucleotide does not comprise an agonistic or antagonistic CpG region motif described herein.

[0176] In some embodiments, the present disclosure pertains to a method of administering a therapeutic oligonucleotide to a patient, wherein the therapeutic oligonucleotide mediates less immune stimulation than a first oligonucleotide, wherein the therapeutic oligonucleotide is selected using a method comprising the steps of: (a) providing the first oligonucleotide, wherein the first oligonucleotide has a defined base sequence comprising at least one CpG region; and measuring the immune stimulation in a human cell mediated by the first oligonucleotide; (b) providing one or more second oligonucleotides, wherein the second oligonucleotides have the same base sequence as the first oligonucleotide and further comprise one or more phosphorothioates in the CpG region, wherein the stereochemistry of the phosphorothioates in the CpG region of the second oligonucleotides differs from the stereochemistry of any phosphorothioates in the CpG region of the first oligonucleotides; and measuring the immune stimulation in a human cell of the second oligonucleotides, wherein steps (a) and (b) can be performed in any order; (c) selecting a second oligonucleotide which mediates less immune stimulation than the first oligonucleotide as the therapeutic oligonucleotide.

[0177] In some embodiments, the present disclosure pertains to the method of any one of the preceding embodiments, wherein the first oligonucleotide is immunostimulatory in a human cell.

[0178] In some embodiments, the present disclosure pertains to the method of any one of the preceding embodiments, wherein the second oligonucleotide comprises at least one phosphorothioate in the Sp conformation and at least one phosphorothioate in the Rp conformation in the CpG region motif.

[0179] In some embodiments, the present disclosure pertains to the method of any one of the preceding embodiments, wherein the second oligonucleotide does not comprise an agonistic CpG region motif described herein.

[0180] In some embodiments, the present disclosure pertains to the method of any one of the preceding embodiments, wherein the second oligonucleotide does not comprise an antagonistic CpG region motif described herein.

[0181] In some embodiments, the present disclosure pertains to the method of any one of the preceding embodiments, wherein the second oligonucleotide does not comprise an agonistic or antagonistic CpG region motif described herein.

[0182] In some embodiments, the present disclosure pertains to a method, comprising administering a composition comprising a first plurality of oligonucleotides, each of which: (a) hybridizes with a particular target sequence; and (b) has base sequence that includes at least one CpG region motif present in all oligonucleotides of the plurality (a “common CpG region motif”), which CpG region motif has a structure: N₁-(*R/S)-C-(*R/S)-G-(*R/S)-N₂; wherein each (*R/S) is independently a chiral internucleotidic linkage, wherein the composition is chirally controlled in that it contains a predetermined level of each of stereoisomers 1-8 (S1-S8) for each common CpG region motif: S1: N₁-(*R)-C-(*R)-G-(*R)-N₂; S2: N₁-(*R)-C-(*R)-G-(*S)-N₂; S3: N₁-(*R)-C-(*S)-G-(*R)-N₂; S4: N₁-(*R)-C-(*S)-G-(*S)-N₂; S5: N₁-(*S)-C-(*R)-G-(*R)-N₂; S6: N₁-(*S)-C-(*R)-G-(*S)-N₂; S7: N₁-(*S)-C-(*S)-G-(*R)-N₂; S8: N₁-(*S)-C-(*S)-G-(*S)-N₂; wherein the composition is characterized by reduced immune stimulation relative to a reference composition, which differs from the composition in that it is stereorandom with respect to internucleotidic linkages of at least one CpG region motif.

[0183] In some embodiments, the present disclosure pertains to, in some embodiments, the present disclosure pertains to, in a method of administering an oligonucleotide composition comprising a plurality of oligonucleotides having a common base sequence, the improvement that comprises: administering a composition comprising a first plurality of oligonucleotides, each of which: (a) hybridizes with a particular target sequence; and (b) has base sequence that includes at least one CpG region motif present in all oligonucleotides of the plurality (a “common CpG region motif”), which CpG region motif has a structure: N₁-(*R/S)-C-(*R/S)-G-(*R/S)-N₂; wherein each (*R/S) is independently a chiral internucleotidic linkage, wherein the composition is chirally controlled in that it contains a predetermined level of each of stereoisomers 1-8 (S1-S8) for each common CpG region motif: S1: N₁-(*R)-C-(*R)-G-(*R)-N₂; S2: N₁-(*R)-C-(*R)-G-(*S)-N₂; S3: N₁-(*R)-C-(*S)-G-(*R)-N₂; S4: N₁-(*R)-C-(*S)-G-(*S)-N₂; S5: N₁-(*S)-C-(*R)-G-(*R)-N₂; S6: N₁-(*S)-C-(*R)-G-(*S)-N₂; S7: N₁-(*S)-C-(*S)-G-(*R)-N₂; S8: N₁-(*S)-C-(*S)-G-(*S)-N₂; wherein the composition is characterized by reduced immune stimulation relative to a reference composition, which differs from the composition in that it is stereorandom with respect to internucleotidic linkages of at least one CpG region motif.

[0184] In some embodiments, the present disclosure pertains to a method, comprising administering a chirally controlled oligonucleotide composition that is chirally controlled in that the composition comprises a predetermined level of oligonucleotides of an individual oligonucleotide type, wherein an oligonucleotide type is defined by: 1) base sequence; 2) pattern of backbone linkages; 3) pattern of backbone chiral centers; and 4) pattern of backbone phosphorus modifications; wherein each oligonucleotide of the individual oligonucleotide type independently comprises at least one copy of a CpG region motif: N₁-(*R/S)-C-(*R/S)-G-(*R/S)-N₂; wherein: each (*R/S) is independently a chiral internucleotidic linkage; oligonucleotides of the individual oligonucleotide have the common base sequence; and the chirally controlled oligonucleotide composition displays reduced immune stimulation relative to a reference oligonucleotide composition, which reference oligonucleotide composition is a stereorandom oligonucleotide composition comprising oligonucleotides having the same common base sequence, or a chirally controlled oligonucleotide composition of oligonucleotides having the same common base sequence but of a different oligonucleotide type.

[0185] In some embodiments, the present disclosure pertains to, in a method of administering an oligonucleotide composition comprising a plurality of oligonucleotides having a common base sequence, the improvement that comprises: administering a chirally controlled oligonucleotide composition that is chirally controlled in that the composition comprises a predetermined level of oligonucleotides of an individual oligonucleotide type, wherein an oligonucleotide type is defined by: 1) base sequence; 2) pattern of backbone linkages; 3) pattern of backbone chiral centers; and 4) pattern of backbone phosphorus modifications; wherein each oligonucleotide of the individual oligonucleotide type independently comprises at least one copy of a CpG region motif: N₁-(*R/S)-C-(*R/S)-G-(*R/S)-N₂; wherein: each (*R/S) is independently a chiral internucleotidic linkage; oligonucleotides of the individual oligonucleotide type have the common base sequence; and the chirally controlled oligonucleotide composition displays reduced immune stimulation relative to a reference oligonucleotide composition, which reference oligonucleotide composition is a stereorandom oligonucleotide composition comprising oligonucleotides having the same common base sequence, or a chirally controlled oligonucleotide composition of oligonucleotides having the same common base sequence but of a different oligonucleotide type.

[0186] In some embodiments, the present disclosure pertains to the method of any one of the preceding embodiments, wherein the reference oligonucleotide composition is a chirally controlled oligonucleotide composition of oligonucleotides having the same common base sequence but a different pattern of backbone chiral centers.

[0187] In some embodiments, the present disclosure pertains to the method of any one of the preceding embodiments, wherein the reference oligonucleotide composition is a chirally controlled oligonucleotide composition of oligonucleotides having the same common base sequence but a different pattern of backbone chiral centers.

[0188] In some embodiments, the present disclosure pertains to a method, comprising administering a chirally controlled oligonucleotide composition, wherein the composition comprises a plurality of oligonucleotides, each of which: (a) hybridizes with a particular target sequence; (b) has base sequence that includes at least one C residue in a CpG that is present in all oligonucleotides of the plurality (a “common C residue”) and that has a 5-methyl group, a 2′-OMe group in its sugar moiety, or both; and (c) includes one or more chiral internucleotidic linkages, so that each oligonucleotide is a particular stereoform, characterized by its stereoidentity [stereoidentity=which stereoisomer is present at a particular chiral linkage] at each of the one or more chiral internucleotidic linkages, wherein the composition is chirally controlled in that it contains a predetermined level of each stereoform, and the composition is substantially free of those stereoforms that individually, and in the absence of other stereoforms, activate TLR9.

[0189] In some embodiments, the present disclosure pertains to, in a method comprising administering a chirally controlled oligonucleotide composition, wherein the composition comprises a plurality of oligonucleotides, each of which: (a) hybridizes with a particular target sequence; (b) has base sequence that includes at least one C residue in a CpG region motif that is present in all oligonucleotides of the plurality (a “common C residue”) and that has a 5-methyl group, a 2′-OMe group in its sugar moiety, or both; and (c) includes one or more chiral internucleotidic linkages; the improvement that comprises administering a composition comprising a plurality of oligonucleotides, each of which: (a) hybridizes with the same target sequence; (b) has base sequence that includes the same common C residue in a CpG region motif that has a 5-methyl group, a 2′-OMe group in its sugar moiety, or both; and (c) includes one or more chiral internucleotidic linkages, so that each oligonucleotide is a particular stereoform, characterized by its stereoidentity [stereoidentity=which stereoisomer is present at a particular chiral linkage] at each of the one or more chiral internucleotidic linkages, wherein the composition is chirally controlled in that it contains a predetermined level of each stereoform, and the composition is substantially free of those stereoforms that individually, and in the absence of other stereoforms, activate TLR9.

[0190] In some embodiments, the present disclosure pertains to a method, comprising administering a composition that is chirally controlled in that the composition comprises a predetermined level of oligonucleotides of an individual oligonucleotide type, wherein an oligonucleotide type is defined by: 1) base sequence; 2) pattern of backbone linkages; 3) pattern of backbone chiral centers; and 4) pattern of backbone phosphorus modifications; wherein the base sequence includes at least one C residue in a CpG region motif that has a 5-methyl group, a 2′-OMe group in its sugar moiety, or both; and the composition is substantially free of oligonucleotides of a different oligonucleotide type having the same sequence that individually, and in the absence of other stereoforms, activate TLR9.

[0191] In some embodiments, the present disclosure pertains to, in a method comprising administering a composition of oligonucleotides of a common base sequence, wherein the common base sequence includes at least one C residue in a CpG region motif that has a 5-methyl group, a 2′-OMe group in its sugar moiety, or both; the improvement comprises administering a composition that is chirally controlled in that the composition comprises a predetermined level of oligonucleotides of an individual oligonucleotide type, wherein an oligonucleotide type is defined by: 1) base sequence; 2) pattern of backbone linkages; 3) pattern of backbone chiral centers; and 4) pattern of backbone phosphorus modifications; wherein oligonucleotides of the individual oligonucleotide type has the same common sequence, the base sequence includes the same at least one C residue in a CpG region motif that has a 5-methyl group, a 2′-OMe group in its sugar moiety, or both; and the composition is substantially free of oligonucleotides of a different oligonucleotide type having the same sequence that individually, and in the absence of other stereoforms, activate TLR9.

[0192] In some embodiments, the present disclosure pertains to a method comprising a step of administering to a subject a composition of any one of preceding embodiments.

[0193] In some embodiments, the present disclosure pertains to, in a method of agonizing an immune response in a subject, the improvement comprises: administering to the subject a composition of any one of the preceding embodiments.

[0194] In some embodiments, the present disclosure pertains to, in a method of agonizing an immune response in a human subject, the improvement comprises: administering to the subject a composition of any one of the preceding embodiments.

[0195] In some embodiments, the present disclosure pertains to the composition or method of any of the preceding embodiments, wherein the oligonucleotides are structurally identical.

[0196] In some embodiments, the present disclosure pertains to the composition or method of any of the preceding embodiments, wherein each (*R/S) is independently a phosphorothioate linkage.

[0197] In some embodiments, the present disclosure pertains to the composition or method of any of the preceding embodiments, wherein the oligonucleotides comprises an Rp phosphorothioate linkage within a CpG region motif, and an Sp phosphorothioate linkage within a CpG region motif.

[0198] In some embodiments, the present disclosure pertains to the composition or method of any of the preceding embodiments, wherein the at least one CpG region motif comprises at least comprises an Rp phosphorothioate linkage and at least one Sp phosphorothioate linkage within a CpG region motif.

[0199] In some embodiments, the present disclosure pertains to the composition or method of any of the preceding embodiments, wherein the oligonucleotides comprise at least 5 nucleotides.

[0200] In some embodiments, the present disclosure pertains to the composition or method of any of the preceding embodiments, wherein the oligonucleotides comprise no more than 49 nucleotides.

[0201] In some embodiments, the present disclosure pertains to the composition or method of any of the preceding embodiments, wherein the oligonucleotides comprise 5 or more chiral internucleotidic linkages;

[0202] In some embodiments, the present disclosure pertains to the composition or method of any of the preceding embodiments, wherein the oligonucleotides comprise 10 or more chiral internucleotidic linkages;

[0203] In some embodiments, the present disclosure pertains to the composition or method of any of the preceding embodiments, wherein the oligonucleotides comprise 15 or more chiral internucleotidic linkages.

[0204] In some embodiments, the present disclosure pertains to the composition or method of any one of the preceding embodiments, wherein one or more nucleotides in the CpG region is an RNA or DNA nucleotide.

[0205] In some embodiments, the present disclosure pertains to the composition or method of any one of the preceding embodiments, wherein at least one sugar is not modified.

[0206] In some embodiments, the present disclosure pertains to the composition or method of any one of the preceding embodiments, wherein at least one sugar is modified.

[0207] In some embodiments, the present disclosure pertains to the composition or method of any one of the preceding embodiments, wherein at least one sugar is modified, wherein the modification is 2′-OMe, 2′-MOE, 2′-F, or 2′-OR, wherein R is optionally substituted C₁₋₆ alkyl.

[0208] In some embodiments, the present disclosure pertains to the composition or method of any of the preceding embodiments, wherein the modification is 2′-OR, wherein R is optionally substituted C₁₋₆ alkyl.

[0209] In some embodiments, the present disclosure pertains to the composition or method of any one of the preceding embodiments, wherein at least five sugars are modified.

[0210] In some embodiments, the present disclosure pertains to the composition or method of any one of the preceding embodiments, wherein at least five sugars are modified, wherein the modification is 2′-OMe, 2′-MOE, 2′-F, or 2′-OR, wherein R is optionally substituted C₁₋₆ alkyl.

[0211] In some embodiments, the present disclosure pertains to the composition or method of any one of the preceding embodiments, wherein at least ten sugars are modified.

[0212] In some embodiments, the present disclosure pertains to the composition or method of any one of the preceding embodiments, wherein at least ten sugars are modified, wherein the modification is 2′-OMe, 2′-MOE, 2′-F, or 2′-OR, wherein R is optionally substituted C₁₋₆ alkyl.

[0213] In some embodiments, the present disclosure pertains to the composition or method of any one of the preceding embodiments, wherein the strand further comprises a nucleotide substitute.

[0214] In some embodiments, the present disclosure pertains to the composition or method of any one of the preceding embodiments, wherein the strand further comprises a Morpholino, PNA, LNA, BNA, TNA, GNA, ANA, FANA, CeNa, HNA or UNA.

[0215] In some embodiments, the present disclosure pertains to the composition or method of any one of the preceding embodiments, wherein at least one internucleotidic linkage is modified.

[0216] In some embodiments, the present disclosure pertains to the composition or method of any one of the preceding embodiments, wherein at least one internucleotidic linkage is selected from: phosphorodithioate, phosphoramidate, boranophosphonate, an amide linker, or a compound of formula (I): (I), where R3 is selected from O″, S″, NH₂, BH₃, CH₃, C₁₋₆ alkyl, C₆₋₁₀ aryl, C₁₋₆ alkoxy and C₆₋₁₀ aryl-oxy, wherein C₁₋₆ alkyl and C₆₋₁₀ aryl are unsubstituted or optionally independently substituted with 1 to 3 groups independently selected from halo, hydroxyl and NH2; and R4 is selected from O, S, NH, or CH₂.

[0217] In some embodiments, the present disclosure pertains to the composition or method of any one of the preceding embodiments, wherein at least one internucleotidic linkage is phosphorodithioate.

[0218] In some embodiments, the present disclosure pertains to the composition or method of any one of the preceding embodiments, wherein the CpG oligonucleotide further comprises a second strand.

[0219] In some embodiments, the present disclosure pertains to the composition or method of any one of the preceding embodiments, wherein the CpG oligonucleotide is capable of agonizing an immune response.

[0220] In some embodiments, the present disclosure pertains to the composition or method of any one of the preceding embodiments, wherein the CpG oligonucleotide is capable of agonizing an immune response in human cells.

[0221] In some embodiments, the present disclosure pertains to the composition or method of any one of the preceding embodiments, wherein the immune response is agonized in a human cell or human.

[0222] In some embodiments, the present disclosure pertains to the composition or method of any one of the preceding embodiments, wherein the CpG oligonucleotide further comprises a second strand.

[0223] In some embodiments, the present disclosure pertains to the composition or method of any one of the preceding embodiments, wherein each oligonucleotide in the plurality/composition has the same base sequence

[0224] In some embodiments, the present disclosure pertains to the composition or method of any one of the preceding embodiments, wherein, for at least one common CpG region motif, the composition is substantially free of at least stereoisomer S8, so that the predetermined level is considered to be substantially zero.

[0225] In some embodiments, the present disclosure pertains to the composition or method of any one of the preceding embodiments, wherein, for at least one common CpG region motif, the composition is substantially free of at least seven of the stereoisomers, so that the predetermined level is considered to be substantially zero for seven of the stereoisomers.

[0226] In some embodiments, the present disclosure pertains to the composition or method of any one of the preceding embodiments, wherein each oligonucleotide in the composition includes at least one non-chiral internucleosidic linkage outside of the CpG region motif.

[0227] In some embodiments, the present disclosure pertains to the composition or method of any one of the preceding embodiments, wherein the composition is substantially racemic for at least one chiral internucleosidic linkage outside of the CpG region motif.

[0228] In some embodiments, the present disclosure pertains to the composition or method of any one of the preceding embodiments, wherein the CpG region motif's “C” residue is methylated and the composition is substantially free of at least stereoisomers.

[0229] In some embodiments, the present disclosure pertains to the composition or method of any one of the preceding embodiments, wherein the composition is capable of activating an TLR9-associated or TLR9-mediated immune response less than a stereorandom composition of oligonucleotides having the same sequence.

[0230] In some embodiments, the present disclosure pertains to the composition or method of any one of the preceding embodiments, wherein the C residue in the CpG region motif comprises a 2′-OMe group in its sugar moiety . . . .

[0231] In some embodiments, the present disclosure pertains to the composition or method of any one of the preceding embodiments, wherein the C residue in the CpG region motif is a 5-methyl-2′-OMe C residue

[0232] In some embodiments, the present disclosure pertains to the composition or method of any one of the preceding embodiments, wherein one or more nucleotides in the CpG region is RNA or DNA.

[0233] In some embodiments, the present disclosure pertains to the composition or method of any one of the preceding embodiments, wherein at least one sugar is not modified.

[0234] In some embodiments, the present disclosure pertains to the composition or method of any one of the preceding embodiments, wherein at least one sugar is modified.

[0235] In some embodiments, the present disclosure pertains to the composition or method of any one of the preceding embodiments, wherein at least one sugar is modified, wherein the modification is 2′-OMe, 2′-MOE, 2′-F, or 2′-OR, wherein R is optionally substituted C₁₋₆ alkyl.

[0236] In some embodiments, the present disclosure pertains to the composition or method of any one of the preceding embodiments, wherein at least five sugars are modified.

[0237] In some embodiments, the present disclosure pertains to the composition or method of any one of the preceding embodiments, wherein at least five sugars are modified, wherein the modification is 2′-OMe, 2′-MOE, 2′-F, or 2′-OR, wherein R is optionally substituted C₁₋₆ alkyl.

[0238] In some embodiments, the present disclosure pertains to the composition or method of any one of the preceding embodiments, wherein at least ten sugars are modified.

[0239] In some embodiments, the present disclosure pertains to the composition or method of any one of the preceding embodiments, wherein at least ten sugars are modified, wherein the modification is 2′-OMe, 2′-MOE, 2′-F, or 2′-OR, wherein R is optionally substituted C₁₋₆ alkyl.

[0240] In some embodiments, the present disclosure pertains to the composition or method of any one of the preceding embodiments, wherein the strand comprises a nucleotide substitute.

[0241] In some embodiments, the present disclosure pertains to the composition or method of any one of the preceding embodiments, wherein the strand further comprises a Morpholino, PNA, LNA, BNA, TNA, GNA, ANA, FANA, CeNa, HNA or UNA.

[0242] In some embodiments, the present disclosure pertains to the composition or method of any one of the preceding embodiments, wherein at least one internucleotidic linkage is modified.

[0243] In some embodiments, the present disclosure pertains to the composition or method of any one of the preceding embodiments, wherein at least one internucleotidic linkage is selected from: phosphorodithioate, phosphoramidate, boranophosphonate, an amide linker, or a compound of formula (I): (I), where R3 is selected from O″, S″, NH₂, BH₃, CH₃, C₁₋₆ alkyl, C₆₋₁₀ aryl, C₁₋₆ alkoxy and C₆₋₁₀ aryl-oxy, wherein C₁₋₆ alkyl and C₆₋₁₀ aryl are unsubstituted or optionally independently substituted with 1 to 3 groups independently selected from halo, hydroxyl and NH2; and R4 is selected from O, S, NH, or CH₂.

[0244] In some embodiments, the present disclosure pertains to the composition or method of any one of the preceding embodiments, further comprising a immunologically active component.

[0245] In some embodiments, the present disclosure pertains to the composition or method of any one of the preceding embodiments, further comprising a immunologically active component selected from: an immunogen, an antigen, a toxin, a virus, a bacterium, a fungus, an infectious agent, a cancer antigen, a pathogen, and a component thereof.

[0246] In some embodiments, the present disclosure pertains to the composition or method of any one of the preceding embodiments, further comprising a immunologically active component, wherein the CpG oligonucleotide is conjugated to the immunologically active component.

[0247] In some embodiments, the present disclosure pertains to the composition or method of any one of the preceding embodiments, further comprising a immunologically active component selected from: an immunogen, an antigen, a toxin, a virus, a bacterium, a fungus, an infectious agent, a cancer antigen, a pathogen, and a component thereof, wherein the CpG oligonucleotide is conjugated to the immunologically active component.

[0248] In some embodiments, the present disclosure pertains to the composition or method of any one of the preceding embodiments, further comprising an additional adjuvant, a stabilizer, a preservative, or an antibiotic.

[0249] In some embodiments, the present disclosure pertains to the composition or method of any one of the preceding embodiments, wherein *R is a modified internucleotidic linkage in the Rp conformation, *S is a modified internucleotidic linkage in the Sp conformation, and *R/S is a modified internucleotidic linkage in the Rp or Sp conformation.

[0250] In some embodiments, the present disclosure pertains to the composition or method of any one of the preceding embodiments, wherein *R is a phosphorothioate in the Rp conformation, *S is a phosphorothioate in the Sp conformation, and *R/S is phosphorothioate in the Rp or Sp conformation.

[0251] In some embodiments, the present disclosure pertains to a chirally controlled oligonucleotide composition comprising a CpG oligonucleotide comprising a strand comprising about 14 to about 49 nucleotides, wherein the strand comprises at least two copies of CpG region motif N₁-(*R/S)-C-(*R/S)-G-(*R/S)-N₂, wherein at least one (*R/S) is a modified internucleotidic linkage in the Rp conformation and at least one (*R/S) is a modified internucleotidic linkage in the Sp conformation, and each of N₁ and N₂ is independently any nucleoside.

[0252] In some embodiments, the present disclosure pertains to a chirally controlled oligonucleotide composition comprising a CpG oligonucleotide comprising a strand comprising about 14 to about 49 nucleotides, wherein the strand comprises at least two copies of CpG region motif N₁-(*R/S)-C-(*R/S)-G-(*R/S)-N₂, wherein at least one (*R/S) is a phosphorothioate in the Rp conformation and at least one (*R/S) is a phosphorothioate in the Sp conformation, and each of N₁ and N₂ is independently any nucleoside.

[0253] In some embodiments, the present disclosure pertains to a composition comprising a CpG oligonucleotide comprising a strand comprising about 14 to about 49 nucleotides, wherein the strand comprises at least two copies of CpG region motif N₁-(*R/S)-C-(*R/S)-G-(*R/S)-N₂, wherein at least one (*R/S) is a phosphorothioate in the Rp conformation and at least one (*R/S) is a phosphorothioate in the Sp conformation, and each of N₁ and N₂ is independently any nucleoside.

[0254] In some embodiments, the present disclosure pertains to the method or composition of any of the preceding embodiments, wherein the CpG oligonucleotide comprises two or more copies of a CpG region motif.

[0255] In some embodiments, the present disclosure pertains to the method or composition of any of the preceding embodiments, wherein the CpG oligonucleotide comprises two or more copies of a CpG region motif disclosed herein.

[0256] In some embodiments, the present disclosure pertains to the method or composition of any of the preceding embodiments, wherein the CpG oligonucleotide comprises two or more CpG region motifs disclosed herein.

[0257] In some embodiments, the present disclosure pertains to the method or composition of any of the preceding embodiments, wherein the CpG oligonucleotide comprises two or more CpG region motifs disclosed herein, wherein the motifs are different from each other.

[0258] In some embodiments, the present disclosure pertains to the method or composition of any of the preceding embodiments, wherein the CpG oligonucleotide comprises two or more CpG region motifs disclosed herein, wherein the motifs are the same as each other.

[0259] In some embodiments, the present disclosure pertains to the method or composition of any of the preceding embodiments, wherein the CpG oligonucleotide is agonistic.

[0260] In some embodiments, the present disclosure pertains to the method or composition of any of the preceding embodiments, wherein the CpG oligonucleotide is agonistic in human cells.

[0261] In some embodiments, the present disclosure pertains to the method or composition of any of the preceding embodiments, wherein the CpG oligonucleotide is agonistic, as measured by an increase in secretion of a cytokine, interferon-alpha, interferon-gamma, IL-4, IL-6, IL-8, IL-10, IL-12, and/or TNF-alpha, and/or an increase in NF-κβ activity.

[0262] In some embodiments, the present disclosure pertains to the method or composition of any of the preceding embodiments, wherein the CpG oligonucleotide is antagonistic.

[0263] In some embodiments, the present disclosure pertains to the method or composition of any of the preceding embodiments, wherein the CpG oligonucleotide is antagonistic in human cells.

[0264] In some embodiments, the present disclosure pertains to the method or composition of any of the preceding embodiments, wherein the CpG oligonucleotide is antagonistic, as measured by a decrease in secretion of a cytokine, interferon-alpha, interferon-gamma, IL-4, IL-6, IL-8, IL-10, IL-12, and/or TNF-alpha, and/or an increase in NF-κβ activity.

### BRIEF DESCRIPTION OF THE DRAWING

[0265] FIG. 1 shows that stereochemistry of the backbone of the CpG oligonucleotide affects mouse TLR9 activities in agonist and antagonist assays; data from SMAD7 series. The CpG dinucleotide is underlined. In FIG. 1 and various other figures, agonistic activity of CpG oligonucleotides was measured as an increase in NF-κβ activity. In various figures, antagonistic activity of CpG oligonucleotides was measured as a decrease in NF-κβ activity (in competition with a TLR9 agonist, e.g. ODN2006 for human studies, or ODN1826 for mouse studies). FIG. 1 discloses SEQ ID NOS 1768 and 1770, respectively, in order of appearance.

[0266] FIG. 2 shows that stereochemistry of CpG and flanking linkages modulate activities of mouse TLR9; data from SMAD7 series. FIG. 2 discloses SEQ ID NOS 1757, 1759 and 1768, respectively, in order of appearance.

[0267] FIG. 3 shows that methylation of CpG does not always significantly reduce mouse TLR9 activity and that the results are also dependent on stereochemistry of internucleotidic linkages; data from SMAD7 series. FIG. 3 discloses SEQ ID NOS 1759, 1758, 1768 and 1777, respectively, in order of appearance.

[0268] FIG. 4 shows the correlation of mouse TLR9 activities in vitro and in vivo, with in vitro data shown; data from SMAD7 series. FIG. 4 discloses SEQ ID NOS 1775, 1777 and 1776, respectively, in order of appearance.

[0269] FIG. 5 shows that in an in vivo TNBS induced IBD mouse model, oral administration of WV-499 at 250 mg/kg significantly reduced the inflammation in the gut as measured by colitis score of inflammation, edema and mucosal necrosis of colon sections; the stereopure isomer, WV-966, had little effect.

[0270] FIG. 6 shows that 2′ modification on CpG in some embodiments eliminates TLR9 agonist activity for mouse TLR9; data from SMAD7 series. FIG. 6 discloses SEQ ID NOS 1759, 1761, 1760, 1764 and 1765, respectively, in order of appearance.

[0271] FIG. 7 shows the effects of stereochemistry of CpG region motifs on human TLR9 activities; data from ODN2006 series. FIG. 7 discloses SEQ ID NOS 1781-1788, respectively, in order of appearance.

[0272] FIG. 8 shows that, in this experiment, some CpG oligonucleotides were not highly active. FIG. 8 discloses SEQ ID NOS 1789-1791, 1793 and 1795, respectively, in order of appearance.

[0273] FIG. 9 shows that certain activities of the SMAD7 series oligonucleotides. WV-1384 is a mouse TLR9 agonist, but not human TLR9 agonist. Data from SMAD7 series. FIG. 9 discloses SEQ ID NOS 1768 and 1770, respectively, in order of appearance.

[0274] FIG. 10 shows that stereochemistry of the CpG region motif affects activities of mouse TLR9; data from SOD1 series. FIG. 10 discloses SEQ ID NOS 1805 and 1808-1812, respectively, in order of appearance.

[0275] FIG. 11 shows that methylation of CpG may affect activities of mouse TLR9; data from SOD1 series. FIG. 11 discloses SEQ ID NOS 1805 and 1807, respectively, in order of appearance.

[0276] FIG. 12 shows that stereochemistry of oligonucleotide backbone internucleotidic linkages affects activities of mouse TLR9; data from SOD1 series. FIG. 12 discloses SEQ ID NOS 1806 and 1809, respectively, in order of appearance.

[0277] FIG. 13 shows assay results of certain oligonucleotides of the SOD1 series. FIG. 13 discloses SEQ ID NOS 1806 and 1809, respectively, in order of appearance.

[0278] FIG. 14 shows that sugar modifications and/or methylation of C did not always significantly reduce or eliminate human TLR9 agonist activity; data from SOD1 series. FIG. 14 discloses SEQ ID NOS 1799, 1800, 1815 and 1816, respectively, in order of appearance.

[0279] FIG. 15 shows that stereochemistry affects human TLR9 activity even in the presence of base and sugar modifications; data from SOD1 series. FIG. 15 discloses SEQ ID NOS 1799-1804, respectively, in order of appearance.

[0280] FIG. 16 shows that replacement of CpG with ApG reduces human TLR9 activity of the parental sequence; data from SOD1 series. FIG. 16 discloses SEQ ID NOS 1817 and 1818, respectively, in order of appearance.

[0281] FIG. 17 shows the correlation of reporter assay with cytokine releases from human PBMC; data from SOD1 series. In this figure, agonistic activity of CpG oligonucleotides was measured by secretion of inflammatory cytokines (IL-6 and MIP-1). FIG. 17 discloses SEQ ID NOS 1796 and 1798-1800, respectively, in order of appearance.

[0282] FIG. 18 shows mouse and human TLR9 responses against various CpG oligonucleotides. FIG. 18 discloses SEQ ID NOS 1796, 1798-1800, 1817 and 1818, respectively, in order of appearance.

[0283] FIG. 19 shows that various CpG oligonucleotides have no immunomodulatory activity on cells lacking TLR9.

[0284] FIG. 20 shows the agonist activity of WV-488 can be sequestered by antagonistic CpG oligonucleotides.

[0285] FIG. 21 shows mouse and human TLR9 responses against various CpG oligonucleotides. FIG. 21 discloses SEQ ID NOS 1797, 1834, 1796 and 1798-1800, respectively, in order of appearance.

[0286] FIG. 22 shows activities of OND2006 series on mouse TLR9.

[0287] FIG. 23 shows that example provided oligonucleotides comprising lipid moieties can effectively counteract hTLR9 agonistic activity (and to antagonize hTLR9). As demonstrated, conjugates of lipids (e.g., stearic acid (WV-3545) or turbinaric acid (WV-3546)) and oligonucleotides (e.g., WV-3473 (WV-3545 and WV-3546)) have significantly increased hTLR9 antagonistic activities. The concentration of agonistic oligonucleotide ODN2006 was held constant at 0.3 μM. Each oligonucleotide was tested at decreasing concentrations of: 5, 2.5, 1.25, 0.6, 0.3, 0.15 and 0.075 μM (from left to right). Treatment was gymnotic (without transfection reagent). The experiment was done in triplicate, with average data shown.

[0288] FIG. 24 shows that example provided oligonucleotides comprising lipid moieties can effectively counteract hTLR9 agonistic activity (and to antagonize hTLR9). As demonstrated, conjugates of lipids (e.g., stearic acid (WV-3545) or turbinaric acid (WV-3546)) and oligonucleotides (e.g., WV-3473 (WV-3545 and WV-3546)) have significantly increased hTLR9 antagonistic activities. neg: negative control (buffer only). ODN2006c: an agonistic control in which the CpG sequence is replaced by GpC. PMO: Eteplirsen. The concentration of agonistic oligonucleotide ODN2006 was held constant at 0.3 μM. Each oligonucleotide was tested at decreasing concentrations of: 5, 2.5, 1.25, 0.6, 0.3, 0.15 and 0.075 μM (from left to right). Treatment was gymnotic (without transfection reagent). The experiment was done in triplicate, with average data shown.

[0289] FIG. 25 shows that several example provided oligonucleotides do not have hTLR9 agonist activity under the tested conditions. The experiment was done in triplicate, with average data shown.

[0290] FIG. 26 shows lipid conjugation can improve TLR9-related activities and other properties. Presented are example data of oligonucleotides comprising lipid moieties in skipping exon 51 of human dystrophin. Data for different doses from 0.3 μM to 30 μM, are presented. Skipping efficiency generally increases with increased concentration. WV-3545 (WV-3473 conjugated to stearic acid by PO and C6 amino linker) and WV-3546 (WV-3473 conjugated to turbinaric acid by PO and C6 amino linker), both containing lipid moieties, demonstrated higher efficiency. Treatment was gymnotic (without transfection reagent). The experiment was done in triplicate, with average data shown.

### DETAILED DESCRIPTION OF CERTAIN EMBODIMENTS

### Terms and Definitions

[0291] As used herein, the following definitions shall apply unless otherwise indicated. For purposes of this disclosure, the chemical elements are identified in accordance with the Periodic Table of the Elements, CAS version, Handbook of Chemistry and Physics, 75th Ed. Additionally, general principles of organic chemistry are described in “Organic Chemistry”, Thomas Sorrell, University Science Books, Sausalito: 1999, and “March's Advanced Organic Chemistry”, 5th Ed., Ed.: Smith, M. B. and March, J., John Wiley & Sons, New York: 2001, the entire contents of which are hereby incorporated by reference.

[0292] Nucleic acid: The term “nucleic acid”, as used herein, includes any dimer, trimer, tetramer or polymer comprising nucleotides, modified nucleotides and/or nucleotide analogs. The term “polynucleotide” as used herein refers to a polymeric form of any length of nucleotides, modified nucleotides and/or nucleotide analogs, including ribonucleotides (RNA) or deoxyribonucleotides (DNA). These terms refer to the primary structure of the molecules and, thus, include double- and single-stranded DNA, and double- and single-stranded RNA. These terms include, as equivalents, analogs of either RNA or DNA made from nucleotide analogs and modified polynucleotides such as, though not limited to, methylated, protected and/or capped nucleotides or polynucleotides. The terms encompass poly- or oligo-ribonucleotides (RNA) and poly- or oligo-deoxyribonucleotides (DNA); RNA or DNA derived from N-glycosides or C-glycosides of nucleobases and/or modified nucleobases; nucleic acids derived from sugars and/or modified sugars; and nucleic acids derived from phosphate bridges and/or modified phosphorus-atom bridges or internucleotidic linkage. The term encompasses nucleic acids containing any combinations of nucleobases, modified nucleobases, sugars, modified sugars, phosphate bridges or modified phosphorus atom bridges. Examples include, and are not limited to, nucleic acids containing ribose moieties, the nucleic acids containing deoxy-ribose moieties, nucleic acids containing both ribose and deoxyribose moieties, nucleic acids containing ribose and modified ribose moieties. In some embodiments, the prefix poly- refers to a nucleic acid containing 2 to about 10,000 nucleotide monomer units and wherein the prefix oligo- refers to a nucleic acid containing 2 to about 200 nucleotide monomer units. In some embodiments, a nucleic acid includes, but not limited to, deoxyribonucleotides or ribonucleotides and polymers thereof, for example, in at least partially single- or double-stranded form. In some embodiments, a nucleic acid includes any nucleotides, modified nucleotides, and/or nucleotide analogs, and polymers thereof. In some embodiments, a polynucleotide includes a polymeric form of nucleotides of any length, either ribonucleotides (RNA) or deoxyribonucleotides (DNA). These terms refer to the primary structure of the molecules and, thus, include double- and single-stranded DNA, and double- and single-stranded RNA. These terms include, as equivalents, analogs of either RNA or DNA made from nucleotide analogs and modified polynucleotides such as, though not limited to, methylated, protected and/or capped nucleotides or polynucleotides. Analogs of RNA and DNA (e.g., nucleotide analogs) include, but are not limited to: Morpholino, PNA, LNA, BNA, TNA, GNA, ANA, FANA, CeNa, HNA and UNA. Modified nucleotides include those which are modified in the phosphate, sugar, and/or base. Such modifications include sugar modifications at the 2′ carbon, such as 2′-MOE, 2′-OMe, and 2′-F. In some embodiments, a nucleic acid includes a poly- or oligo-ribonucleotide (RNA) and poly- or oligo-deoxyribonucleotide (DNA); RNA or DNA derived from N-glycosides or C-glycosides of nucleobases and/or modified nucleobases; nucleic acids derived from sugars and/or modified sugars; and nucleic acids derived from phosphate bridges and/or modified phosphorus-atom bridges or internucleotidic linkage. The term encompasses nucleic acids containing any combinations of nucleobases, modified nucleobases, sugars, modified sugars, phosphate bridges or modified phosphorus atom bridges. Examples include, and are not limited to, nucleic acids containing ribose moieties, the nucleic acids containing deoxy-ribose moieties, nucleic acids containing both ribose and deoxyribose moieties, nucleic acids containing ribose and modified ribose moieties. In some embodiments, a nucleic acid is an oligonucleotide, an antisense oligonucleotide, an RNAi agent, a miRNA, splice switching oligonucleotide (SSO), immunomodulatory nucleic acid, an aptamer, a ribozyme, a Piwi-interacting RNA (piRNA), a small nucleolar RNA (snoRNA), a mRNA, a lncRNA, a ncRNA, an antagomir (e.g., an antagonist to a miRNA, lncRNA, ncRNA or other nucleic acid), a plasmid, a vector, or a portion thereof. In some embodiments, a nucleic acid is a chirally controlled nucleic acid composition. In some embodiments, a nucleic acid is a chirally controlled oligonucleotide composition, or a chirally controlled nucleic acid composition. In some embodiments, a base, nucleobase, nitrogenous base, heterocyclic base and the like includes a part (or a modified variant thereof) of a nucleic acid that is involved in the hydrogen-bonding that binds one nucleic acid strand to another complementary strand in a sequence-specific manner. The naturally occurring bases, [guanine, (G), adenine, (A), cytosine, (C), thymine, (T), and uracil (U)] are derivatives of purine (Pu) or pyrimidine (Py), though it should be understood that naturally and non-naturally occurring base analogs are also included. In some embodiments, the nucleobases are modified adenine, guanine, uracil, cytosine, or thymine. In some embodiments, the modified nucleobase mimics the spatial arrangement, electronic properties, or some other physicochemical property of the nucleobase and retains the property of hydrogen-bonding that binds one nucleic acid strand to another in a sequence specific manner. In some embodiments, a modified nucleobase can pair with all of the five naturally occurring bases (uracil, thymine, adenine, cytosine, or guanine) without substantially affecting the melting behavior, recognition by intracellular enzymes or activity of the oligonucleotide duplex. Various additional modifications of the bases are known in the art. In some cases, a nucleic acid sequence can be defined as a sequence of bases, generally presented in the 5′ to 3′ direction. While in the context of a nucleic acid, a base is normally conjugated to a sugar which forms the backbone along with an internucleotidic linkage (e.g., a phosphate or phosphorothioate or other modified internucleotidic linkage); however, as used herein, the term “base” does not comprise a sugar or an internucleotidic linkage. In some embodiments, a nucleoside includes a unit consisting of: (a) a base covalently bound to (b) a sugar. The base and/or sugar can be modified or not modified. In some embodiments, a sugar, as referenced herein in the context of referencing a nucleic acid, includes a monosaccharide in closed and/or open form. The naturally occurring sugar is the pentose (five-carbon sugar) deoxyribose (which forms DNA) or ribose (which forms RNA), though it should be understood that naturally and non-naturally occurring sugar analogs are also included. Sugars include, but are not limited to, ribose, deoxyribose, pentofuranose, pentopyranose, and hexopyranose moieties. As used herein, the term also encompasses structural analogs used in lieu of conventional sugar molecules, such as glycol, polymer of which forms the backbone of the nucleic acid analog, glycol nucleic acid (“GNA”). A deoxynucleoside comprises a deoxyribose. In some cases, a nucleic acid sequence can be defined as a sequence of bases and sugar modifications. In some embodiments, a sugar includes a modified sugar or unmodified sugar. In some embodiments, a modified sugar includes, as referenced in the context of a nucleic acid, a sugar which has been modified or a moiety that can functionally replace a sugar in a nucleic acid or modified nucleic acid. The modified sugar mimics the spatial arrangement, electronic properties, or some other physicochemical property of a sugar. A modified sugar, as a non-limiting example, can have a modification at the 2′ carbon. Various modifications include 2′-MOE, 2′-OMe and 2′-F. Various additional modifications of the sugar are known in the art. In some embodiments, a nucleotide includes a monomeric unit of a polynucleotide that consists of: (a) a heterocyclic base, a sugar, and one or more phosphate groups or phosphorus-containing internucleotidic linkages; a nucleotide is a subunit of a polynucleotide, nucleic acid or oligonucleotide. Each base, sugar and phosphate or internucleoside linker can be independently modified or not modified. Many internucleotidic linkages are known in the art (such as, though not limited to, phosphate, phosphorothioates, boranophosphates and the like). Artificial nucleic acids include PNAs (peptide nucleic acids), phosphotriesters, phosphorothioates, H-phosphonates, phosphoramidates, boranophosphates, methylphosphonates, phosphonoacetates, thiophosphonoacetates and other variants of the phosphate backbone of native nucleic acids, such as those described herein. In some embodiments, an internucleotidic linkage includes linkage between nucleoside units of an oligonucleotide; in most cases the linkage comprises a phosphorus or linkage phosphorus; in some embodiments, the linkage is referred to as “p”. In some embodiments, an internucleotidic linkage is a phosphodiester linkage, as found in naturally occurring DNA and RNA molecules. In some embodiments, the linkage is a phosphorothioate. In some embodiments, the backbone of an oligonucleotide or a nucleic acid includes the alternating sugars and internucleotidic linkages (e.g., a phosphodiester or phosphorothioate). Unless specifically limited, the term encompasses nucleic acids containing known analogues of natural nucleotides which have similar binding properties as the reference nucleic acid and are metabolized in a manner similar to naturally occurring nucleotides. Unless otherwise indicated, a particular nucleic acid sequence also implicitly encompasses conservatively modified variants thereof (e.g., degenerate codon substitutions) and complementary sequences and as well as the sequence explicitly indicated. Specifically, degenerate codon substitutions can be achieved by generating sequences in which the third position of one or more selected (or all) codons is substituted with mixed-base and/or deoxyinosine residues (Batzer et al., Nucleic Acid Res. 19:5081 (1991); Ohtsuka et al., J. Biol. Chem. 260:2605-2608 (1985); and Rossolini et al., Mol. Cell. Probes 8:91-98 (1994)). Also included are molecules having naturally occurring phosphodiester linkages as well as those having non-naturally occurring linkages, e.g., for stabilization purposes. The nucleic acid can be in any physical form, e.g., linear, circular, nicked, or supercoiled. The term nucleic acid is used interchangeably with oligonucleotide, gene, cDNA, and mRNA encoded by a gene. In various embodiments, one or more nucleotides is modified or is substituted with one or more DNA, a peptide nucleic acid (PNA), locked nucleic acid (LNA), morpholino nucleotide, threose nucleic acid (TNA), glycol nucleic acid (GNA), arabinose nucleic acid (ANA), 2′-fluoroarabinose nucleic acid (FANA), cyclohexene nucleic acid (CeNA), anhydrohexitol nucleic acid (HNA), constrained ethyl (cEt), tricyclo-DNA (tc-DNA), xeno nucleic acid (XNA), and/or unlocked nucleic acid (UNA). In various embodiments, the nucleic acid comprises a modified internucleoside linker.

[0293] Nucleotide: The term “nucleotide” as used herein refers to a monomeric unit of a polynucleotide that consists of a heterocyclic base, a sugar, and one or more phosphate groups or phosphorus-containing internucleotidic linkages. The naturally occurring bases, (guanine, (G), adenine, (A), cytosine, (C), thymine, (T), and uracil (U)) are derivatives of purine or pyrimidine, though it should be understood that naturally and non-naturally occurring base analogs are also included. The naturally occurring sugar is the pentose (five-carbon sugar) deoxyribose (which forms DNA) or ribose (which forms RNA), though it should be understood that naturally and non-naturally occurring sugar analogs are also included. Nucleotides are linked via internucleotidic linkages to form nucleic acids, or polynucleotides. Many internucleotidic linkages are known in the art (such as, though not limited to, phosphate, phosphorothioates, boranophosphates and the like). Artificial nucleic acids include PNAs (peptide nucleic acids), phosphotriesters, phosphorothioates, H-phosphonates, phosphoramidates, boranophosphates, methylphosphonates, phosphonoacetates, thiophosphonoacetates and other variants of the phosphate backbone of native nucleic acids, such as those described herein. As described herein, in some embodiments, a nucleotide is a natural nucleotide; in some embodiments, a nucleotide is modified.

[0294] Nucleoside: The term “nucleoside”, as used herein, refers to a moiety wherein a nucleobase or a modified nucleobase is covalently bound to a sugar or modified sugar.

[0295] Sugar: The term “sugar”, as used herein, refers to a saccharide, in some embodiments, a monosaccharide in closed and/or open form. Sugars include, but are not limited to, ribose, deoxyribose, pentofuranose, pentopyranose, and hexopyranose moieties. As used herein, the term also encompasses structural analogs used in lieu of conventional sugar molecules, such as glycol, polymer of which forms the backbone of the nucleic acid analog, glycol nucleic acid (“GNA”).

[0296] Modified sugar: The term “modified sugar”, as used herein, refers to a moiety that can replace a sugar, in some embodiments, in oligonucleotides. The modified sugar mimics the spatial arrangement, electronic properties, or some other physicochemical property of a sugar. In some embodiments, a modified sugar comprises a modification at a 2′ carbon. In some embodiments, a modified sugar comprises a 2′-F, 2′-OMe or 2′-MOE.

[0297] Nucleobase: The term “nucleobase”, as used herein, refers to the parts of nucleic acids that are involved in the hydrogen-bonding that binds one nucleic acid strand to another complementary strand in a sequence specific manner. The most common naturally-occurring nucleobases are adenine (A), guanine (G), uracil (U), cytosine (C), and thymine (T). In some embodiments, the naturally-occurring nucleobases are modified adenine, guanine, uracil, cytosine, or thymine. In some embodiments, the naturally-occurring nucleobases are methylated adenine, guanine, uracil, cytosine, or thymine. In some embodiments, a nucleobase is a “modified nucleobase,” e.g., a nucleobase other than adenine (A), guanine (G), uracil (U), cytosine (C), and thymine (T). In some embodiments, the modified nucleobases are methylated adenine, guanine, uracil, cytosine, or thymine. In some embodiments, the modified nucleobase mimics the spatial arrangement, electronic properties, or some other physicochemical property of the nucleobase and retains the property of hydrogen-bonding that binds one nucleic acid strand to another in a sequence specific manner. In some embodiments, a modified nucleobase can pair with all of the five naturally occurring bases (uracil, thymine, adenine, cytosine, or guanine) without substantially affecting the melting behavior, recognition by intracellular enzymes or activity of the oligonucleotide duplex.

[0298] DNA and other terms: The terms “DNA”, “DNA molecule” and the like, as used herein, refer to a polymeric form of deoxyribonucleotides (adenine, guanine, thymine, or cytosine) in its either single stranded form or a double-stranded helix. This term refers only to the primary and secondary structure of the molecule, and does not limit it to any particular tertiary forms. Thus, this term includes double-stranded DNA found, inter alia, in linear DNA molecules (e.g., restriction fragments), viruses, plasmids, and chromosomes. In discussing the structure of particular double-stranded DNA molecules, sequences can be described herein according to the normal convention of giving only the sequence in the 5′ to 3′ direction along the non-transcribed strand of DNA (i.e., the strand having a sequence homologous to the mRNA).

[0299] Chiral ligand: The term “chiral ligand” or “chiral auxiliary”, as used herein, refers to a moiety that is chiral and can be incorporated into a reaction so that the reaction can be carried out with certain stereoselectivity.

[0300] Condensing reagent: In a condensation reaction, the term “condensing reagent”, as used herein, refers to a reagent that activates a less reactive site and renders it more susceptible to attack by another reagent. In some embodiments, such another reagent is a nucleophile.

[0301] Blocking group: The term “blocking group”, as used herein, refers to a group that masks the reactivity of a functional group. The functional group can be subsequently unmasked by removal of the blocking group. In some embodiments, a blocking group is a protecting group.

[0302] Moiety: The term “moiety”, as used herein, refers to a specific segment or functional group of a molecule. Chemical moieties are often recognized chemical entities embedded in or appended to a molecule.

[0303] Solid support: The term “solid support”, as used herein, refers to any support which enables synthesis of nucleic acids. In some embodiments, the term refers to a glass or a polymer, that is insoluble in the media employed in the reaction steps performed to synthesize nucleic acids, and is derivatized to comprise reactive groups. In some embodiments, the solid support is Highly Cross-linked Polystyrene (HCP) or Controlled Pore Glass (CPG). In some embodiments, the solid support is Controlled Pore Glass (CPG). In some embodiments, the solid support is hybrid support of Controlled Pore Glass (CPG) and Highly Cross-linked Polystyrene (HCP).

[0304] Coding sequence: A DNA “coding sequence” or “coding region” is a double-stranded DNA sequence which is transcribed and translated into a polypeptide in vivo when placed under the control of appropriate expression control sequences. The boundaries of the coding sequence (the “open reading frame” or “ORF”) are determined by a start codon at the 5′ (amino) terminus and a translation stop codon at the 3′ (carboxyl) terminus. A coding sequence can include, but is not limited to, prokaryotic sequences, cDNA from eukaryotic mRNA, genomic DNA sequences from eukaryotic (e.g., mammalian) DNA, and synthetic DNA sequences. A polyadenylation signal and transcription termination sequence is, usually, be located 3′ to the coding sequence. The term “non-coding sequence” or “non-coding region” refers to regions of a polynucleotide sequence that are not translated into amino acids (e.g. 5′ and 3′ un-translated regions).

[0305] Reading frame: The term “reading frame”, as used herein, refers to one of the six possible reading frames, three in each direction, of the double stranded DNA molecule. The reading frame that is used determines which codons are used to encode amino acids within the coding sequence of a DNA molecule.

[0306] Antisense: The term “antisense”, as used herein, for example, in reference to a nucleic acid, refers to a nucleic acid molecule which comprises a nucleotide sequence which is complementary to a “sense” nucleic acid encoding a protein, e.g., complementary to the coding strand of a double-stranded cDNA molecule, complementary to an mRNA sequence or complementary to the coding strand of a gene. Accordingly, an antisense nucleic acid molecule can associate via hydrogen bonds to a sense nucleic acid molecule. In some embodiments, an antisense oligonucleotide is capable of annealing to a target mRNA in a sequence-specific manner and mediating degradation of the mRNA via a RNaseH-dependent mechanism. In some embodiments, an antisense nucleic acid includes, as a non-limiting example, an antisense strand of a siRNA or other RNAi agent, which is capable of anneal to a target mRNA in a sequence-specific manner and mediating degradation of the mRNA via a RISC (RNA inhibition silencing complex)-mediated mechanism. In some embodiments, an antisense strand of a siRNA or other RNAi agent is annealed to a corresponding sense strand; in some embodiments, an antisense strand of a siRNA or other RNAi agent is not annealed to a corresponding sense strand.

[0307] Homology: The terms “Homology” or “identity” or “similarity”, as used herein, refers to sequence similarity between two nucleic acid molecules. Homology and identity can each be determined by comparing a position in each sequence which can be aligned for purposes of comparison. When an equivalent position in the compared sequences is occupied by the same base, then the molecules are identical at that position; when the equivalent site occupied by the same or a similar nucleic acid residue (e.g., similar in steric and/or electronic nature), then the molecules can be referred to as homologous (similar) at that position. Expression as a percentage of homology/similarity or identity refers to a function of the number of identical or similar nucleic acids at positions shared by the compared sequences. A sequence which is “unrelated” or “non-homologous” shares less than 40% identity, less than 35% identity, less than 30% identity, or less than 25% identity with a sequence described herein. In comparing two sequences, the absence of residues (amino acids or nucleic acids) or presence of extra residues also decreases the identity and homology/similarity. In some embodiments, the term “homology” describes a mathematically based comparison of sequence similarities which is used to identify genes with similar functions or motifs. The nucleic acid sequences described herein can be used as a “query sequence” to perform a search against public databases, for example, to identify other family members, related sequences or homologs. In some embodiments, such searches can be performed using the NBLAST and XBLAST programs (version 2.0) of Altschul, et al. (1990) J. Mol. Biol. 215:403-10. In some embodiments, BLAST nucleotide searches can be performed with the NBLAST program, score=100, wordlength=12 to obtain nucleotide sequences homologous to nucleic acid molecules of the disclosure. In some embodiments, to obtain gapped alignments for comparison purposes, Gapped BLAST can be utilized as described in Altschul et al., (1997) Nucleic Acids Res. 25(17):3389-3402. When utilizing BLAST and Gapped BLAST programs, the default parameters of the respective programs (e.g., XBLAST and BLAST) can be used (See www.ncbi.nlm.nih.gov).

[0308] Identity: As used herein, “identity” means the percentage of identical nucleotide residues at corresponding positions in two or more sequences when the sequences are aligned to maximize sequence matching, i.e., taking into account gaps and insertions. Identity can be readily calculated by known methods, including but not limited to those described in (Computational Molecular Biology, Lesk, A. M., ed., Oxford University Press, New York, 1988; Biocomputing: Informatics and Genome Projects, Smith, D. W., ed., Academic Press, New York, 1993; Computer Analysis of Sequence Data, Part I, Griffin, A. M., and Griffin, H. G., eds., Humana Press, New Jersey, 1994; Sequence Analysis in Molecular Biology, von Heinje, G., Academic Press, 1987; and Sequence Analysis Primer, Gribskov, M. and Devereux, J., eds., M Stockton Press, New York, 1991; and Carillo, H., and Lipman, D., SIAM J. Applied Math., 48: 1073 (1988). Methods to determine identity are designed to give the largest match between the sequences tested. Moreover, methods to determine identity are codified in publicly available computer programs. Computer program methods to determine identity between two sequences include, but are not limited to, the GCG program package (Devereux, J., et al., Nucleic Acids Research 12(1): 387 (1984)), BLASTP, BLASTN, and FASTA (Altschul, S. F. et al., J. Molec. Biol. 215: 403-410 (1990) and Altschul et al. Nuc. Acids Res. 25: 3389-3402 (1997)). The BLAST X program is publicly available from NCBI and other sources (BLAST Manual, Altschul, S., et al., NCBI NLM NIH Bethesda, Md. 20894; Altschul, S., et al., J. Mol. Biol. 215: 403-410 (1990). The well-known Smith Waterman algorithm can also be used to determine identity.

[0309] Heterologous: A “heterologous” region of a DNA sequence is an identifiable segment of DNA within a larger DNA sequence that is not found in association with the larger sequence in nature. Thus, when the heterologous region encodes a mammalian gene, the gene can usually be flanked by DNA that does not flank the mammalian genomic DNA in the genome of the source organism. Another example of a heterologous coding sequence is a sequence where the coding sequence itself is not found in nature (e.g., a cDNA where the genomic coding sequence contains introns or synthetic sequences having codons or motifs different than the unmodified gene). Allelic variations or naturally-occurring mutational events do not give rise to a heterologous region of DNA as defined herein.

[0310] Oligonucleotide: The term “oligonucleotide”, as used herein, refers to a polymer or oligomer of nucleotide monomers, containing any combination of nucleobases, modified nucleobases, sugars, modified sugars, phosphate bridges, or modified phosphorus atom bridges (also referred to herein as “internucleotidic linkage”, defined further herein).

[0311] Oligonucleotides can be single-stranded or double-stranded. As used herein, the term “oligonucleotide strand” encompasses a single-stranded oligonucleotide. A single-stranded oligonucleotide can have double-stranded regions and a double-stranded oligonucleotide can have single-stranded regions. Example oligonucleotides include, but are not limited to structural genes, genes including control and termination regions, self-replicating systems such as viral or plasmid DNA, single-stranded and double-stranded siRNAs and other RNA interference reagents (RNAi agents or iRNA agents), shRNA, antisense oligonucleotides, ribozymes, microRNAs, microRNA mimics, supermirs, aptamers, antimirs, antagomirs, Ul adaptors, triplex-forming oligonucleotides, G-quadruplex oligonucleotides, RNA activators, immuno-stimulatory oligonucleotides, and decoy oligonucleotides.

[0312] Double-stranded and single-stranded oligonucleotides that are effective in inducing RNA interference are also referred to as siRNA, RNAi agent, or iRNA agent, herein. In some embodiments, these RNA interference inducing oligonucleotides associate with a cytoplasmic multi-protein complex known as RNAi-induced silencing complex (RISC). In many embodiments, single-stranded and double-stranded RNAi agents are sufficiently long that they can be cleaved by an endogenous molecule, e.g., by Dicer, to produce smaller oligonucleotides that can enter the RISC machinery and participate in RISC mediated cleavage of a target sequence, e.g. a target mRNA.

[0313] Oligonucleotides of the present disclosure can be of various lengths. In particular embodiments, oligonucleotides can range from about 2 to about 200 nucleotides in length. In various related embodiments, oligonucleotides, single-stranded, double-stranded, and triple-stranded, can range in length from about 4 to about 10 nucleotides, from about 10 to about 50 nucleotides, from about 20 to about 50 nucleotides, from about 15 to about 30 nucleotides, from about 20 to about 30 nucleotides in length. In some embodiments, the oligonucleotide is from about 9 to about 39 nucleotides in length. In some embodiments, the oligonucleotide is at least 4 nucleotides in length. In some embodiments, the oligonucleotide is at least 5 nucleotides in length. In some embodiments, the oligonucleotide is at least 6 nucleotides in length. In some embodiments, the oligonucleotide is at least 7 nucleotides in length. In some embodiments, the oligonucleotide is at least 8 nucleotides in length. In some embodiments, the oligonucleotide is at least 9 nucleotides in length. In some embodiments, the oligonucleotide is at least 10 nucleotides in length. In some embodiments, the oligonucleotide is at least 11 nucleotides in length. In some embodiments, the oligonucleotide is at least 12 nucleotides in length. In some embodiments, the oligonucleotide is at least 15 nucleotides in length. In some embodiments, the oligonucleotide is at least 20 nucleotides in length. In some embodiments, the oligonucleotide is at least 25 nucleotides in length. In some embodiments, the oligonucleotide is at least 30 nucleotides in length. In some embodiments, the oligonucleotide is a duplex of complementary strands of at least 18 nucleotides in length. In some embodiments, the oligonucleotide is a duplex of complementary strands of at least 21 nucleotides in length. In some embodiments, a sequence of a nucleic acid or an oligonucleotide comprises or consists of a common base sequence hybridizes with a transcript of dystrophin, myostatin, Huntingtin, a myostatin receptor, ActRIIB, ActRIIA, DMPK, SMN2, dystrophia myotonica protein kinase (DMPK), Proprotein convertase subtilisin/kexin type 9 (PCSK9), SMAD7 or KRT14 (Keratin 14). In some embodiments, a sequence of a nucleic acid or an oligonucleotide comprises or consists of a common base sequence hybridizes with a transcript of a gene related to Huntington's disease, spinal muscular atrophy, spinal muscular atrophy type 1, amyotrophic lateral sclerosis, Duchenne muscular dystrophy, myotonic dystrophy, myotonic dystrophy type 1, a genetic disease of the liver, a metabolic disease of the liver, epidermolysis bullosa simplex, a genetic disease of the skin, a genetic disease of the skin, or irritable bowel syndrome, or a genetic disease, or a metabolic disease.

[0314] Internucleotidic linkage: As used herein, the phrase “internucleotidic linkage”, “internucleotidic linker” and the like refer generally to a linkage, including but not limited to a phosphorus-containing linkage, between nucleotide units of an oligonucleotide, and is interchangeable with “inter-sugar linkage” and “phosphorus atom bridge,” as used above and herein. In some embodiments, an internucleotidic linkage is a phosphodiester linkage, as found in naturally occurring DNA and RNA molecules. In some embodiments, a modified internucleotidic linkage is an internucleotidic linkage which is not phosphorodiester. In some embodiments, an internucleotidic linkage is a “modified internucleotidic linkage”, wherein the internucleotidic linkage is not phosphodiester. In some embodiments of a modified internucleotidic linkage, each oxygen atom of the phosphodiester linkage is optionally and independently replaced by an organic or inorganic moiety. In some embodiments, such an organic or inorganic moiety is selected from but not limited to ═S, ═Se, ═NR′, —SR′, —SeR′, —N(R′)₂, B(R′)₃, —S—, —Se—, and —N(R′)—, wherein each R′ is independently as defined and described below. In some embodiments, a modified internucleotidic linkage is a phosphotriester linkage, phosphorothioate diester linkage (

[chemical structure]

or modified phosphorothioate triester linkage. It is understood by a person of ordinary skill in the art that the internucleotidic linkage can exist as an anion or cation at a given pH due to the existence of acid or base moieties in the linkage.

[0315] Unless otherwise specified, when used with an oligonucleotide sequence, each of s, s1, s2, s3, s4, s5, s6 and s7 independently represents the following modified internucleotidic linkage as illustrated below:

[0316] Example Modified Internucleotidic Linkage.

| Symbol | Modified Internucleotidic Linkage |
|---|---|
| s | phosphorothioate [chemical structure] |
| s1 | [chemical structure] |
| s2 | [chemical structure] |
| s3 | [chemical structure] |
| s4 | [chemical structure] |
| s5 | [chemical structure] |
| s6 | [chemical structure] |
| s7 | [chemical structure] |
| s8 | [chemical structure] |
| s9 | [chemical structure] |
| s10 | [chemical structure] |
| s11 | [chemical structure] |
| s12 | [chemical structure] |
| s13 | [chemical structure] |
| s14 | [chemical structure] |
| s15 | [chemical structure] |
| s16 | [chemical structure] |
| s17 | [chemical structure] |
| s18 | [chemical structure] |

[0317] Additional modified internucleotidic linkages are described by formula I.

[0318] As a non-limiting example, (Rp, Sp)-ATsCs1GA has 1) a phosphorothioate internucleotidic linkage

[chemical structure]

between T and C; and 2) a phosphorothioate triester internucleotidic linkage having the structure of

[chemical structure]

between C and G. Unless otherwise specified, the Rp/Sp designations preceding an oligonucleotide sequence describe the configurations of chiral linkage phosphorus atoms in the internucleotidic linkages sequentially from 5′ to 3′ of the oligonucleotide sequence. For instance, in (Rp, Sp)-ATsCs1GA, the phosphorus in the “s” linkage between T and C has Rp configuration and the phosphorus in “s1” linkage between C and G has Sp configuration. In some embodiments, “All-(Rp)” or “All-(Sp)” is used to indicate that all chiral linkage phosphorus atoms in oligonucleotide have the same Rp or Sp configuration, respectively. For instance, All-(Rp)-GsCsCsTsCsAsGsTsCsTsGsCsTsTsCsGsCsAsCsC (SEQ ID NO: 4) indicates that all the chiral linkage phosphorus atoms in the oligonucleotide have Rp configuration; All-(Sp)-GsCsCsTsCsAsGsTsCsTsGsCsTsTsCsGsCsAsCsC (SEQ ID NO: 5) indicates that all the chiral linkage phosphorus atoms in the oligonucleotide have Sp configuration. In some embodiments, in a modified internucleotidic linkage, a non-bridging oxygen in a phosphodiester is replaced by sulfur. In some embodiments, a modified internucleotidic linkage is a phosphorothioate. In some embodiments, in a modified internucleotidic linkage, both non-bridging oxygens in a phosphodiester are replaced by sulfur. In some embodiments, a modified internucleotidic linkage is a phosphorodithioate. In some embodiments, in a modified internucleotidic linkage, a bridging oxygen of the phosphodiester is replaced by sulfur. In some embodiments, a modified internucleotidic linkage is a phosphorothioic ether. In some embodiments, in a modified internucleotidic linkage, both bridging oxygens of the phosphodiester are replaced by sulfur. In some embodiments, in a modified internucleotidic linkage, a non-bridging oxygen in the phosphodiester is replaced by carbon. In some embodiments, in a modified internucleotidic linkage, any one or more oxygen is replaced by another atom which is not oxygen. In some embodiments, in a modified internucleotidic linkage, the phosphorus is replaced by another atom which is not phosphorus. In some embodiments, in a modified internucleotidic linkage, any one or more oxygens and the phosphorus are replaced by atoms which are not oxygen or phosphorus, respectively.

[0319] Oligonucleotide type: As used herein, the phrase “oligonucleotide type” is used to define an oligonucleotide that has a particular base sequence, pattern of backbone linkages (i.e., pattern of internucleotidic linkage types, for example, phosphate, phosphorothioate, etc.), pattern of backbone chiral centers (i.e. pattern of linkage phosphorus stereochemistry (Rp/Sp)), and pattern of backbone phosphorus modifications (e.g., pattern of “—XLR¹” groups in formula I). In some embodiments, oligonucleotides of a common designated “type” are structurally identical to one another.

[0320] One of skill in the art will appreciate that synthetic methods of the present disclosure provide for a degree of control during the synthesis of an oligonucleotide strand such that each nucleotide unit of the oligonucleotide strand can be designed and/or selected in advance to have a particular stereochemistry at the linkage phosphorus and/or a particular modification at the linkage phosphorus, and/or a particular base, and/or a particular sugar. In some embodiments, an oligonucleotide strand is designed and/or selected in advance to have a particular combination of stereocenters at the linkage phosphorus. In some embodiments, an oligonucleotide strand is designed and/or determined to have a particular combination of modifications at the linkage phosphorus. In some embodiments, an oligonucleotide strand is designed and/or selected to have a particular combination of bases. In some embodiments, an oligonucleotide strand is designed and/or selected to have a particular combination of one or more of the above structural characteristics. The present disclosure provides compositions comprising or consisting of a plurality of oligonucleotide molecules (e.g., chirally controlled oligonucleotide compositions). In some embodiments, all of most of such molecules are of the same type. In some embodiments, provided compositions comprise a plurality of oligonucleotides of different types, typically in pre-determined relative amounts.

[0321] Chiral control: As used herein, “chiral control” refers to an ability to control the stereochemical designation of a chiral modified internucleotidic linkage, e.g., a linkage phosphorus, in a chiral internucleotidic linkage within an oligonucleotide. In some embodiments, a control is achieved through a chiral element that is absent from the sugar and base moieties of an oligonucleotide, for example, in some embodiments, a control is achieved through use of one or more chiral auxiliaries during oligonucleotide preparation as exemplified in the present disclosure.

[0322] Chirally controlled oligonucleotide composition: The terms “chirally controlled oligonucleotide composition”, “chirally controlled nucleic acid composition”, “chirally controlled oligonucleotide composition” and the like, as used herein, refers to a composition that comprising a plurality of oligonucleotides (or nucleic acids) which share 1) a common base sequence, 2) a common pattern of backbone linkages, and 3) a common pattern of backbone phosphorus modifications, wherein the plurality of oligonucleotides share the same stereochemistry at one or more chiral internucleotidic linkages (chirally controlled internucleotidic linkages), and the level of the plurality of oligonucleotides in the composition is pre-determined. In some embodiments, each chiral internucleotidic linkage is a chiral controlled internucleotidic linkage, and the composition is a completely chirally controlled oligonucleotide composition. In some embodiments, not all of most of chiral internucleotidic linkages are chiral controlled internucleotidic linkages, and the composition is a partially chirally controlled oligonucleotide composition. In some embodiments, a chirally controlled oligonucleotide composition comprises predetermined levels of individual oligonucleotide type or nucleic acids types. For instance, in some embodiments a chirally controlled oligonucleotide composition comprises one oligonucleotide type. In some embodiments, a chirally controlled oligonucleotide composition comprises more than one oligonucleotide type. In some embodiments, a chirally controlled oligonucleotide composition comprises multiple oligonucleotide types. In some embodiments, in a chirally controlled oligonucleotide composition, the conformation (e.g., Rp or Sp) of each phosphorothioate or other internucleotidic linkage is defined. In some embodiments, in a chirally controlled oligonucleotide composition, the conformation (Rp or Sp) of at least one phosphorothioate or other internucleotidic linkage is defined, but the conformation of at least one phosphorothioate or other internucleotidic linkage is not defined. As a non-limiting example, in some embodiments, in a chirally controlled oligonucleotide composition, the conformation of the phosphorothioate or other internucleotidic linkage at one or more position can be defined (e.g., as Rp or Sp); however, at one or more other positions, the conformation of the phosphorothioate or other internucleotidic linkage is not defined (e.g., the composition comprises a mixture of molecules wherein some have a phosphorothioate or other internucleotidic linkage in the Rp conformation and some in the Sp conformation at that position).

[0323] Chirally pure: As used herein, the phrase “chirally pure” is used to describe a chirally controlled oligonucleotide composition, or a plurality of oligonucleotides, in which all or most of the oligonucleotides exist in a single diastereomeric form with respect to the linkage phosphorus.

[0324] Chirally uniform: As used herein, the phrase “chirally uniform” is used to describe an oligonucleotide molecule or type in which all of most of nucleotide units have the same stereochemistry at the linkage phosphorus. For instance, an oligonucleotide whose nucleotide units all have Rp stereochemistry at the linkage phosphorus is chirally uniform. Likewise, an oligonucleotide whose nucleotide units all have Sp stereochemistry at the linkage phosphorus is chirally uniform.

[0325] Predetermined: By predetermined (or pre-determined) is meant deliberately selected, for example as opposed to randomly occurring or achieved without control. Those of ordinary skill in the art, reading the present specification, will appreciate that the present disclosure provides technologies that permit selection of particular chemistry and/or stereochemistry features to be incorporated into oligonucleotide compositions, and further permits controlled preparation of oligonucleotide compositions having such chemistry and/or stereochemistry features. Such provided compositions are “predetermined” as described herein. Compositions that may contain certain oligonucleotides because they happen to have been generated through a process that cannot be controlled to intentionally generate the particular chemistry and/or stereochemistry features is not a “predetermined” composition. In some embodiments, a predetermined composition is one that can be intentionally reproduced (e.g., through repetition of a controlled process). In some embodiments, a predetermined level of a plurality of oligonucleotides in a composition means that the absolute amount, and/or the relative amount (ratio, percentage, etc.) of the plurality of oligonucleotides in the composition is controlled.

[0326] Linkage phosphorus: As defined herein, the phrase “linkage phosphorus” is used to indicate that the particular phosphorus atom being referred to is the phosphorus atom present in the internucleotidic linkage, which phosphorus atom corresponds to the phosphorus atom of a phosphodiester of an internucleotidic linkage as occurs in naturally occurring DNA and RNA. In some embodiments, a linkage phosphorus atom is in a modified internucleotidic linkage, wherein each oxygen atom of a phosphodiester linkage is optionally and independently replaced by an organic or inorganic moiety. In some embodiments, a linkage phosphorus atom is P* of formula I. In some embodiments, a linkage phosphorus atom is chiral. In some embodiments, a chiral linkage phosphorus atom is P* of formula I.

[0327] P-modification: As used herein, the term “P-modification” refers to any modification at the linkage phosphorus other than a stereochemical modification. In some embodiments, a P-modification comprises addition, substitution, or removal of a pendant moiety covalently attached to a linkage phosphorus. In some embodiments, the “P-modification” is —X-L-R¹ wherein each of X, L and R¹ is independently as defined and described herein and below.

[0328] Blockmer: The term “blockmer,” as used herein, refers to an oligonucleotide strand whose pattern of structural features characterizing each individual nucleotide unit is characterized by the presence of at least two consecutive nucleotide units sharing a common structural feature at the internucleotidic phosphorus linkage. By common structural feature is meant common stereochemistry at the linkage phosphorus or a common modification at the linkage phosphorus. In some embodiments, the at least two consecutive nucleotide units sharing a common structure feature at the internucleotidic phosphorus linkage are referred to as a “block”.

[0329] In some embodiments, a blockmer is a “stereoblockmer,” e.g., at least two consecutive nucleotide units have the same stereochemistry at the linkage phosphorus. Such at lest two consecutive nucleotide units form a “stereoblock.” For instance, (Sp, Sp)-ATsCs1GA is a stereoblockmer because at least two consecutive nucleotide units, the Ts and the Cs1, have the same stereochemistry at the linkage phosphorus (both Sp). In the same oligonucleotide (Sp, Sp)-ATsCs1GA, TsCs1 forms a block, and it is a stereoblock.

[0330] In some embodiments, a blockmer is a “P-modification blockmer,” e.g., at least two consecutive nucleotide units have the same modification at the linkage phosphorus. Such at lest two consecutive nucleotide units form a “P-modification block”. For instance, (Rp, Sp)-ATsCsGA is a P-modification blockmer because at least two consecutive nucleotide units, the Ts and the Cs, have the same P-modification (i.e., both are a phosphorothioate diester). In the same oligonucleotide of (Rp, Sp)-ATsCsGA, TsCs forms a block, and it is a P-modification block.

[0331] In some embodiments, a blockmer is a “linkage blockmer,” e.g., at least two consecutive nucleotide units have identical stereochemistry and identical modifications at the linkage phosphorus. At least two consecutive nucleotide units form a “linkage block”. For instance, (Rp, Rp)-ATsCsGA is a linkage blockmer because at least two consecutive nucleotide units, the Ts and the Cs, have the same stereochemistry (both Rp) and P-modification (both phosphorothioate). In the same oligonucleotide of (Rp, Rp)-ATsCsGA, TsCs forms a block, and it is a linkage block.

[0332] In some embodiments, a blockmer comprises one or more blocks independently selected from a stereoblock, a P-modification block and a linkage block. In some embodiments, a blockmer is a stereoblockmer with respect to one block, and/or a P-modification blockmer with respect to another block, and/or a linkage blockmer with respect to yet another block. For instance, (Rp, Rp, Rp, Rp, Rp, Sp, Sp, Sp)-AAsTsCsGsAs1Ts1Cs1Gs1ATCG (SEQ ID NO: 6) is a stereoblockmer with respect to the stereoblock AsTsCsGsAs1 (all Rp at linkage phosphorus) or Ts1Cs1Gs1 (all Sp at linkage phosphorus), a P-modification blockmer with respect to the P-modification block AsTsCsGs (all s linkage) or As1Ts1Cs1Gs1 (all s1 linkage), or a linkage blockmer with respect to the linkage block AsTsCsGs (all Rp at linkage phosphorus and all s linkage) or Ts1Cs1Gs1 (all Sp at linkage phosphorus and all s1 linkage).

[0333] Altmer: The term “altmer,” as used herein, refers to an oligonucleotide strand whose pattern of structural features characterizing each individual nucleotide unit is characterized in that no two consecutive nucleotide units of the oligonucleotide strand share a particular structural feature at the internucleotidic phosphorus linkage. In some embodiments, an altmer is designed such that it comprises a repeating pattern. In some embodiments, an altmer is designed such that it does not comprise a repeating pattern.

[0334] In some embodiments, an altmer is a “stereoaltmer,” e.g., no two consecutive nucleotide units have the same stereochemistry at the linkage phosphorus. For instance, (Rp, Sp, Rp, Sp, Rp, Sp, Rp, Sp, Rp, Sp Rp, Sp, Rp, Sp, Rp, Sp, Rp, Sp, Rp)-GsCsCsTsCsAsGsTsCsTsGsCsTsTsCsGsCsAsCsC (SEQ ID NO: 7).

[0335] In some embodiments, an altmer is a “P-modification altmer” e.g., no two consecutive nucleotide units have the same modification at the linkage phosphorus. For instance, All-(Sp)-CAs1GsT, in which each linkage phosphorus has a different P-modification than the others.

[0336] In some embodiments, an altmer is a “linkage altmer,” e.g., no two consecutive nucleotide units have identical stereochemistry or identical modifications at the linkage phosphorus. For instance, (Rp, Sp, Rp, Sp, Rp, Sp, Rp, Sp, Rp, Sp Rp, Sp, Rp, Sp, Rp, Sp, Rp, Sp, Rp)-GsCs1CsTs1CsAs1GsTs1CsTs1GsCs1TsTs2CsGs3CsAs4CsC (SEQ ID NO: 8).

[0337] Sequence: As used herein, the term “sequence” refers to any arrangement of molecules or atoms characteristic of a particular molecule. In some embodiments, in referencing a nucleic acid, a “sequence” refers to any of: base sequence (including length), the pattern of chemical modifications to sugar and base moieties, the pattern of backbone linkages (e.g., pattern of natural phosphate linkages, phosphorothioate linkages, phosphorothioate triester linkages, and combinations thereof), the pattern of backbone chiral centers (e.g., pattern of stereochemistry (Rp/Sp) of chiral internucleotidic linkages), and the pattern of backbone phosphorus modifications (e.g., pattern of modifications on the internucleotidic phosphorus atom, such as —S⁻, and -L-R¹ of formula I). In some embodiments, in referencing a nucleic acid or oligonucleotide, a “sequence” refers to the sequence of bases or base sequence. In some embodiments, in reference to a peptide or protein, a sequence refers to a sequence of amino acids.

[0338] Unimer: The term “unimer,” as used herein, refers to an oligonucleotide strand whose pattern of structural features characterizing each individual nucleotide unit is such that all nucleotide units within the strand share at least one common structural feature at the internucleotidic phosphorus linkage. By common structural feature is meant common stereochemistry at the linkage phosphorus or a common modification at the linkage phosphorus.

[0339] In some embodiments, a unimer is a “stereounimer,” e.g., all nucleotide units have the same stereochemistry at the linkage phosphorus. For instance, All-(Sp)-CsAs1GsT, in which all the linkages have Sp phosphorus.

[0340] In some embodiments, a unimer is a “P-modification unimer”, e.g., all nucleotide units have the same modification at the linkage phosphorus. For instance, (Rp, Sp, Rp, Sp, Rp, Sp, Rp, Sp, Rp, Sp Rp, Sp, Rp, Sp, Rp, Sp, Rp, Sp, Rp)-GsCsCsTsCsAsGsTsCsTsGsCsTsTsCsGsCsAsCsC (SEQ ID NO: 7), in which all the internucleotidic linkages are phosphorothioate diester.

[0341] In some embodiments, a unimer is a “linkage unimer,” e.g., all nucleotide units have the same stereochemistry and the same modifications at the linkage phosphorus. For instance, All-(Sp)-GsCsCsTsCsAsGsTsCsTsGsCsTsTsCsGsCsAsCsC (SEQ ID NO: 5), in which all the internucleotidic linkages are phosphorothioate diester having Sp linkage phosphorus.

[0342] Gapmer: As used herein, the term “gapmer” refers to an oligonucleotide or oligonucleotide strand comprising two or more chemically distinct segments or regions. In some embodiments, a segment or region is characterized by modifications to the base, sugar and/or internucleotidic linkage, or comprises one or more nucleotide analogs. In some embodiments, a segment or region is characterized in that at least one internucleotidic phosphorus linkage of the oligonucleotide strand is a phosphate diester linkage, for example such as those found in naturally occurring DNA or RNA. In some embodiments, more than one internucleotidic phosphorus linkage of the oligonucleotide strand is a phosphate diester linkage such as those found in naturally occurring DNA or RNA. For instance, All-(Sp)-CAs1GsT, in which the internucleotidic linkage between C and A is a phosphate diester linkage.

[0343] Skipmer: As used herein, the term “skipmer” refers to a type of gapmer in which every other internucleotidic phosphorus linkage of the oligonucleotide strand is a phosphate diester linkage, for example such as those found in naturally occurring DNA or RNA, and every other internucleotidic phosphorus linkage of the oligonucleotide strand is a modified internucleotidic linkage.

[0344] CpG: The terms “CpG”, “CpG dinucleotide”, “CpG motif” and the like, as used herein, refer to the dinucleotide comprising, in 5′ to 3′ order: a nucleoside cytidine (C); a phosphate, phosphorothioate or other internucleoside linkage (p); and a nucleoside guanosine (G). In various CpG oligonucleotides, (p) is phosphorothioate. In some embodiments, the C residue in the CpG comprises modifications of the base and/or the sugar, e.g., 5-methyl C, 2′-modified 5mC (e.g., 2′-OMe 5-methyl C; or 2′-MOE m5C, etc.), etc. In some embodiments, immunomodulatory CpG oligonucleotides comprise base and/or sugar modifications, e.g., 5-methyl C, 2′-modified 5mC (e.g., 2′-OMe 5-methyl C; or 2′-MOE m5C, etc.), etc.

[0345] CpG region motif: The term “CpG region motif”, as used herein, refers to a particular motif, comprising the CpG dinucleotide, plus one or more of the positions flanking (immediately 5′ and/or 3′ of) the CpG, wherein the motif is defined by the base sequence, the chemistry of the base, sugar and internucleotidic linkages (e.g., chemical modifications of bases, sugars and/or internucleotidic linkages, etc.), and stereochemistry of chiral internucleotidic linkages (e.g., if the phosphorothioate at a particular position is in the Rp or Sp configuration). Various CpG region motifs are presented herein, which can agonize or antagonize an immunostimulatory effect. In some embodiments, the C residue in the CpG comprises base and/or sugar modifications, e.g., 5-methyl C, 2′-modified 5mC (e.g., 2′-OMe 5-methyl C; or 2′-MOE m5C, etc.), etc. In some embodiments, immunomodulatory CpG oligonucleotides comprise base and/or sugar modifications, e.g., 5-methyl C, 2′-modified 5mC (e.g., 2′-OMe 5-methyl C; or 2′-MOE m5C, etc.), etc.

[0346] CpG oligonucleotide: The term “CpG oligonucleotide”, as used herein, refers to an oligonucleotide which comprises at least one CpG or CpG region motif. In some embodiments, a CpG oligonucleotide comprises at least two CpG dinucleotides or CpG region motifs. Some CpG oligonucleotides are capable of agonizing an immune response in at least one assay; others are capable of antagonizing an immune response in at least one assay. Others do neither. In some embodiments, a CpG oligonucleotide optionally comprises modifications of sugars, bases and/or internucleotidic linkages, as well as secondary and tertiary structures. See, for example, Vollmer et al. 2009 Adv. Drug. Del. Rev. 61: 195-204. One example of a modified internucleotidic linkage is phosphorothioate. For example, a CpG oligonucleotide can comprise all phosphodiesters in the backbone; or a mixture of phosphodiesters and internucleoside linkers in the backbone; or all internucleoside linkers in the backbone. In various embodiments, a CpG oligonucleotide comprises a phosphorothioate which is in the Rp or Sp conformation. An immunomodulatory CpG oligonucleotide is capable of modulating an immune response, including agonizing or antagonizing an immune response. In some embodiments, an “immunostimulatory” CpG oligonucleotide is capable of agonizing an immune response. Oligonucleotides, including CpG oligonucleotides, can be single-stranded or, in some embodiments, at least partially double-stranded. As used herein, the term “oligonucleotide strand” encompasses a single-stranded oligonucleotide. A single-stranded oligonucleotide can have double-stranded regions and a double-stranded oligonucleotide can have single-stranded regions. Oligonucleotides can also form one or two single-stranded loops with one or more double-stranded regions. See, for example, Schmidt et al. 2015 Nucl. Acid Therp. 25: 130-140. Example oligonucleotides include, but are not limited to structural genes, genes including control and termination regions, self-replicating systems such as viral or plasmid DNA, single-stranded and double-stranded siRNAs and other RNA interference reagents (RNAi agents or iRNA agents), shRNA, antisense oligonucleotides, ribozymes, microRNAs, microRNA mimics, supermirs, aptamers, antimirs, antagomirs, Ul adaptors, triplex-forming oligonucleotides, G-quadruplex oligonucleotides, RNA activators, immuno-stimulatory oligonucleotides, and decoy oligonucleotides. A CpG oligonucleotide, in some embodiments, can comprise a strand having (1) a single-stranded region and (2) another region or regions which is double stranded. Such structures are reported in, as a non-limiting example, Schmidt et al. 2015 Nucl. Acid Therp. 25: 130-140. In some embodiments, CpG oligonucleotides have the structure of a covalently closed DNA molecule, comprising one single-stranded loop and a double-stranded stem, or two single-stranded loops connected through a double-stranded stem, wherein the stem and/or one or both loops can comprise one or more CpG region motifs. In some embodiments, a CpG oligonucleotide of the present disclosure can comprise any novel CpG region motif disclosed herein and have the structure of a covalently closed DNA molecule, comprising one single-stranded loop and a double-stranded stem, or two single-stranded loops connected through a double-stranded stem, wherein the stem and/or one or both loops can comprise one or more CpG region motifs. In some embodiments, the present disclosure pertains to a CpG oligonucleotide comprising a first strand comprising one or more novel CpG region motifs, optionally further comprising a second strand. In some embodiments, the C residue in the CpG comprises base and/or sugar modifications, e.g., 5-methyl C, 2′-modified 5mC (e.g., 2′-OMe 5-methyl C; or 2′-MOE m5C, etc.), etc. In some embodiments, immunomodulatory CpG oligonucleotides comprise base and/or sugar modifications, e.g., 5-methyl C, 2′-modified 5mC (e.g., 2′-OMe 5-methyl C; or 2′-MOE m5C, etc.), etc.

[0347] A CpG oligonucleotide can comprise one strand; or, optionally, it can further comprise a second or other additional strands. A CpG oligonucleotide can further comprise or be conjugated to other components which are not nucleotides.

[0348] Adjuvant: An “adjuvant” is an immunological agent that can enhance the magnitude, breadth, quality and/or longevity of a specific immune response generated against a co-administered antigen. Among other things, adjuvants can be used to reduce the dose and frequency of immunizations required to achieve protective immunity. In some embodiments, provided CpG oligonucleotide technologies (e.g., oligonucleotides, compositions, methods, etc.) can be used as adjuvants. See, for example, Shirota et al. 2015 Vaccines 3: 390-407, and references cited therein.

[0349] Agonism: By “agonism”, “agonizing”, “induction”, “stimulation”, “immunostimulation”, and the like, of the immune response, as used herein, is meant full or at least partial activation or increase in activity, or the capability of activating or decreasing activity, of an immune response (e.g., a response mediated by immune cells), for example, in a mammal such as a mouse or human; such activation can be measured by any method known in the art. Methods include, but are not limited to, measurement of change in secretion of a cytokine, e.g., interferon-alpha, interferon-gamma, IL-4, IL-6, IL-8, IL-10, IL-12, TNF-alpha, etc. Such methods include, as non-limiting examples, ELISPOT assay, use of peripheral blood mononuclear cells, other assays involving measurements of immune activity in animals and cells, etc. The amount of production of cytokinins in the cell can be determined, for example, using specific antibodies. In this way, it is possible to measure the number of immune cells in the cells, and assess the immunity-inducing activity. In various embodiments, agonism of an immune response is mediated by a CpG oligonucleotide. In various embodiments, if the CpG oligonucleotide is administered with an immunologically active agent such as a vaccine, agonism can be measured by a change in the level of antibodies produced to the agent. In various embodiments, the mammal includes, as non-limiting examples, mouse and human.

[0350] Aliphatic: As used herein, “aliphatic” means a straight-chain (i.e., unbranched) or branched, substituted or unsubstituted hydrocarbon chain that is completely saturated or that contains one or more units of unsaturation, or a substituted or unsubstituted monocyclic, bicyclic, or polycyclic hydrocarbon ring that is completely saturated or that contains one or more units of unsaturation (but not aromatic), or combinations thereof. Unless otherwise specified, aliphatic groups contain 1-100 aliphatic carbon atoms. In some embodiments, aliphatic groups contain 1-20 aliphatic carbon atoms. In other embodiments, aliphatic groups contain 1-10 aliphatic carbon atoms. In other embodiments, aliphatic groups contain 1-9 aliphatic carbon atoms. In other embodiments, aliphatic groups contain 1-8 aliphatic carbon atoms. In other embodiments, aliphatic groups contain 1-7 aliphatic carbon atoms. In other embodiments, aliphatic groups contain 1-6 aliphatic carbon atoms. In still other embodiments, aliphatic groups contain 1-5 aliphatic carbon atoms, and in yet other embodiments, aliphatic groups contain 1, 2, 3, or 4 aliphatic carbon atoms. Suitable aliphatic groups include, but are not limited to, linear or branched, substituted or unsubstituted alkyl, alkenyl, alkynyl groups and hybrids thereof.

[0351] Alkenyl: As used herein, the term “alkenyl” refers to an alkyl group, as defined herein, having one or more double bonds.

[0352] Alkyl: As used herein, the term “alkyl” is given its ordinary meaning in the art and may include saturated aliphatic groups, including straight-chain alkyl groups, branched-chain alkyl groups, cycloalkyl (alicyclic) groups, alkyl substituted cycloalkyl groups, and cycloalkyl substituted alkyl groups. In some embodiments, alkyl has 1-100 carbon atoms. In certain embodiments, a straight chain or branched chain alkyl has about 1-20 carbon atoms in its backbone (e.g., C₁-C₂₀ for straight chain, C₂-C₂₀ for branched chain), and alternatively, about 1-10. In some embodiments, cycloalkyl rings have from about 3-10 carbon atoms in their ring structure where such rings are monocyclic, bicyclic, or polycyclic, and alternatively about 5, 6 or 7 carbons in the ring structure. In some embodiments, an alkyl group may be a lower alkyl group, wherein a lower alkyl group comprises 1-4 carbon atoms (e.g., C₁-C₄ for straight chain lower alkyls).

[0353] Alkynyl: As used herein, the term “alkynyl” refers to an alkyl group, as defined herein, having one or more triple bonds.

[0354] Animal: As used herein, the term “animal” refers to any member of the animal kingdom. In some embodiments, “animal” refers to humans, at any stage of development. In some embodiments, “animal” refers to non-human animals, at any stage of development. In certain embodiments, the non-human animal is a mammal (e.g., a rodent, a mouse, a rat, a rabbit, a monkey, a dog, a cat, a sheep, a bovine, a horse, a primate, and/or a pig). In some embodiments, animals include, but are not limited to, mammals, birds, reptiles, amphibians, fish, and/or worms. In some embodiments, an animal may be a transgenic animal, a genetically-engineered animal, and/or a clone.

[0355] Antagonism: By “antagonism”, “antagonizing”, and the like, of the immune response, as used herein is meant a full or at least partial inactivation or decrease in activity, or capability of inactivating or decreasing activity, of an immune response (e.g., a response mediated by immune cells), for example, in a mammal; such inactivation or decrease in activity can be measured by any method known in the art. Methods include, but are not limited to, measurement of change in secretion of a cytokine, e.g., interferon-alpha, interferon-gamma, IL-4, IL-6, IL-8, IL-10, IL-12, TNF-alpha, etc. Such methods include, as non-limiting examples, ELISPOT assay, use of peripheral blood mononuclear cells, other assays involving measurements of immune activity in animals and cells, etc. In various embodiments, antagonism of an immune response is mediated by a CpG oligonucleotide. In various embodiments, the mammal includes, as non-limiting examples, mouse and human.

[0356] Antibody: The terms “antibody”, “immunoglobulin” and related terms, as used herein, refer to a protein (or fragment thereof, or biologically active fragment thereof), e.g., produced mainly by plasma cells that is used by the immune system to recognize, identify and/or neutralize specific antigens, epitopes, structures, pathogens, nucleic acids and other molecules. In some embodiments, an antibody recognizes a unique molecule of the harmful agent, called an antigen, via the variable region. In some embodiments, antibodies include, without limitation: monoclonal antibodies (including full length antibodies which have an immunoglobulin Fc region), antibody compositions with polyepitopic specificity, multispecific antibodies (e.g., bispecific antibodies, diabodies, and single-chain molecules), as well as antibody fragments. In some embodiments, an antibody is a monoclonal antibody, for example, an antibody obtained from a population of substantially homogeneous antibodies. In some embodiments, an antibody is a chimeric antibody, in which a portion of the heavy and/or light chain is identical with or homologous to corresponding sequences in antibodies derived from a particular species or belonging to a particular antibody class or subclass, while the remainder of the chain(s) is (are) identical with or homologous to corresponding sequences in antibodies derived from another species or belonging to another antibody class or subclass, as well as fragments of such antibodies, so long as they exhibit the desired biological activity. Chimeric antibodies of interest herein include, but are not limited to, “primatized” antibodies comprising variable domain antigen-binding sequences derived from a non-human primate (e.g., Old World Monkey, Ape etc.) and human constant region sequences. In some embodiments, an antibody fragment comprises a portion of an intact antibody, preferably the antigen binding and/or the variable region of the intact antibody. Non-limiting examples of antibody fragments include Fab, Fab′, F(ab′)2 and Fv fragments; diabodies; linear antibodies; nanobodies; single-chain antibody molecules and multispecific antibodies formed from antibody fragments. In some embodiments, an antibody can be of any of five classes, IgA, IgD, IgE, IgG and IgM, and can be encoded by a mRNA, including the heavy chains designated alpha, delta, epsilon, gamma and mu, respectively. In some embodiments, any of the subclasses of antibodies can be encoded in part or in whole and include the following subclasses: IgG1, IgG2, IgG3, IgG4, IgAQ1 and IgA2. In various embodiments, an antibody can be utilized to treat conditions or diseases in many therapeutic areas such as, but not limited to, blood, cardiovascular, CNS, poisoning (including antivenoms), dermatology, endocrinology, gastrointestinal, medical imaging, musculoskeletal, oncology, immunology, respiratory, sensory and anti-infective. In some embodiments, an antibody is any of antibody variants, including, but not limited to, substitutional variants, conservative amino acid substitution, insertional variants, deletional variants and/or covalent derivatives. In one embodiment, the primary construct and/or mmRNA disclosed herein can encode an immunoglobulin Fc region. In another embodiment, the primary constructs and/or mmRNA can encode a variant immunoglobulin Fc region. In some embodiments, the primary constructs and/or mmRNA can encode an antibody having a variant immunoglobulin Fc region as described in U.S. Pat. No. 8,217,147.

[0357] Antisense oligonucleotide: The terms “antisense oligonucleotide” or “ASO”, as used herein, refer to an oligonucleotide or the like having, comprising, or consisting of a sequence of bases or the like which allow the oligonucleotide or the like to hybridize to a target molecule, such as another nucleic acid, modified nucleic acid or nucleic acid analog, e.g., by base-pairing, such as Watson-Crick base-pairing or non-Watson-Crick basepairing. In some embodiments, an antisense oligonucleotide is fully complementary or nearly fully complementary to the target molecule. In some embodiments, any olignucleotide of any type described herein or known in the art can be used as an antisense oligonucleotide. In various embodiments, an antisense oligonucleotide can perform or participate in any of various biological functions, including RNA interference, RNaseH-mediated cleavage, exon skipping, the prevention of exon skipping, the enhancement or blocking of an agent (e.g., a protein, RNA, protein-RNA complex, or any other molecule) from binding to another nucleic acid, or any other biological function performed by an antisense oligonucleotide, as described herein or known in the art. In some embodiments, an antisense oligonucleotide is an oligonucleotide which participates in RNaseH-mediated cleavage; for example, an antisense oligonucleotide hybridizes in a sequence-specific manner to a portion of a target mRNA, thus targeting the mRNA for cleavage my RNase H. In some embodiments, an antisense oligonucleotide is able to differentiate between a wild-type and a mutant allele of a target. In some embodiments, an antisense oligonucleotide significantly participates in RNaseH-mediated cleavage of a mutant allele but participates in RNaseH-mediated cleavage of a wild-type allele to a much less degree (e.g., does not significantly participate in RNaseH-mediated cleavage of the wild-type allele of the target).

[0358] Approximately: As used herein, the terms “approximately” or “about” in reference to a number are generally taken to include numbers that fall within a range of 5%, 10%, 15%, or 20% in either direction (greater than or less than) of the number unless otherwise stated or otherwise evident from the context (except where such number would be less than 0% or exceed 100% of a possible value). In some embodiments, use of the term “about” in reference to dosages means ±5 mg/kg/day.

[0359] Aptamer: The term “aptamer”, as used herein, refers to a nucleic acid molecule, e.g., a molecule comprising a RNA, DNA or nucleotide analog, that is capable of binding to a specific molecule with high affinity and specificity (Ellington et al., Nature 346, 818-22 (1990); and Tuerk et al., Science 249, 505-10 (1990)). In various embodiments, a ligand that binds to an aptamer includes, without limitation, small molecules, such as drugs, metabolites, intermediates, cofactors, transition state analogs, ions, metals, nucleic acids, and toxins. In some embodiments, an aptamer can also bind natural and synthetic polymers, including proteins, peptides, nucleic acids, polysaccharides, glycoproteins, hormones, receptors and cell surfaces such as cell walls and cell membranes. In some embodiments, an aptamer is between about 10 and about 300 nucleotides in length. In some embodiments, an aptamer is between about 30 and about 100 nucleotides in length. In some embodiments, an aptamer can bind to a wide variety of molecules. Each of these molecules can be used as a modulator of gene expression. In some embodiments, organic molecules, nucleotides, amino acids, polypeptides, target features on cell surfaces, ions, metals, salts, saccharides, have all been shown to be suitable for isolating aptamers that can specifically bind to the respective ligand. For instance, organic dyes such as Hoechst 33258 have reportedly been used as target ligands in vitro aptamer selections (Werstuck and Green, Science 282:296-298 (1998)). Other small organic molecules like dopamine, theophylline, sulforhodamine B, and cellobiose have also been reported as ligands in the isolation of aptamers. In some embodiments, an aptamers is been isolated for antibiotics such as kanamycin A, lividomycin, tobramycin, neomycin B, viomycin, chloramphenicol and streptomycin. For a review of aptamers that recognize small molecules, see Famulok, Science 9:324-9 (1999). In some embodiments, a ligand of the aptamer of an aptamer-regulated nucleic acid of the disclosure is a cell-permeable, small organic molecule. Small organic molecules which do not have a general inhibitory effect on translation can be used as ligands. The small molecule can also exhibit in vivo persistence sufficient for achieving a desired level of inhibition of translation. The molecules also can be screened to identify those that are bioavailable after, for example, oral administration. In some embodiments, the ligand is nontoxic. The ligand can optionally be a drug, including, for example, a steroid. In some embodiments, in some of the methods of controlling gene expression, a ligand can be pharmacologically inert. In some embodiments, a ligand is a polypeptide whose presence in the cell is indicative of a disease or pathological condition. In other embodiments, the ligand for an aptamer is an antibiotic, such as chloramphenicol. In an alternative embodiment, the ligand of the aptamer is an organic dye such as Hoeschst dye 33258. In still another embodiment, the ligand can be a metal ion. In a specific embodiment, the aptamer domain of an aptamer-regulated nucleic acid responds to binding to caffeine. In some embodiments, an aptamers is developed to bind particular ligands by employing known in vivo or in vitro (most typically, in vitro) selection techniques known as SELEX (Ellington et al., Nature 346, 818-22 (1990); and Tuerk et al., Science 249, 505-10 (1990)). Methods of making aptamers are also described in, for example, U.S. Pat. No. 5,582,981, PCT Publication No. WO 00/20040, U.S. Pat. No. 5,270,163, Lorsch and Szostak, Biochemistry, 33:973 (1994), Mannironi et al., Biochemistry 36:9726 (1997), Blind, Proc. Nat'l. Acad. Sci. USA 96:3606-3610 (1999), Huizenga and Szostak, Biochemistry, 34:656-665 (1995), PCT Publication Nos. WO 99/54506, WO 99/27133, WO 97/42317 and U.S. Pat. No. 5,756,291. In some embodiments, aptamers include those that target any of: VEGF, tissue factor pathway inhibitor (TFPI), Factor IXa, complement component 5 (C5), HIV Tat protein, and HIV Rev protein.

[0360] Aryl: The term “aryl”, as used herein, used alone or as part of a larger moiety as in “aralkyl,” “aralkoxy,” or “aryloxyalkyl,” refers to monocyclic, bicyclic or polycyclic ring systems having a total of five to thirty ring members, wherein at least one ring in the system is aromatic. In some embodiments, an aryl group is a monocyclic, bicyclic or polycyclic ring system having a total of five to fourteen ring members, wherein at least one ring in the system is aromatic, and wherein each ring in the system contains 3 to 7 ring members. In some embodiments, an aryl group is a biaryl group. The term “aryl” can be used interchangeably with the term “aryl ring.” In certain embodiments of the present disclosure, “aryl” refers to an aromatic ring system which includes, but not limited to, phenyl, biphenyl, naphthyl, binaphthyl, anthracyl and the like, which can bear one or more substituents. Also included within the scope of the term “aryl,” as it is used herein, is a group in which an aromatic ring is fused to one or more non-aromatic rings, such as indanyl, phthalimidyl, naphthimidyl, phenanthridinyl, or tetrahydronaphthyl, and the like. In some embodiments, an aryl group has a radical or point of attachment on an aromatic ring.

[0361] Biologically active agent: The term “biologically active agent”, as used herein, refers to any agent (including, but not limited to, an active compound) which has, mediates, or participates, or is capable of having, mediating, or participating in a biological activity. In various embodiments, a biologically active agent can be organic or in-organic. Non-limiting examples of biologically active agents include: a small molecule, a peptide, a protein, a component of a CRISPR-Cas system, a carbohydrate, a therapeutic agent, a chemotherapeutic agent, a vaccine, a nucleic acid, and a lipid. In some embodiments, a biologically active agent includes an inorganic or organic molecule including a small molecule, peptide (e.g. cell penetrating peptides), carbohydrate (including monosaccharides, oligosaccharides, and polysaccharides), protein (including nucleoprotein, mucoprotein, lipoprotein, synthetic polypeptide, or a small molecule linked to a protein, glycoprotein), steroid, nucleic acid, lipid, hormone, or combination thereof, that causes a biological effect when administered in vivo to an animal, including but not limited to birds and mammals, including humans. In some embodiments, the biologically active agent is charged. In some embodiments, the biologically active agent is positively charged. In some embodiments, the biologically active agent is negatively charged. In some embodiments, a biologically active agent is a nucleic acid. In some embodiments, a biologically active agent is a CpG oligonucleotide.

[0362] Carbohydrate: The term “carbohydrate”, as used herein, refers to a biological molecule comprising carbon, oxygen and hydrogen; in some embodiments, a carbohydrate includes a saccharide, a sugar, a starch or cellulose. In some embodiments, saccharides include monosaccharides, disaccharides, oligosaccharides and polysaccharides. In some embodiments, a polysaccharide acts as a structural component or for energy storage. In some embodiments, a carbohydrate is involved in the immune system, fertilization, preventing pathogenesis, blood clothing and/or development. In some embodiments, a biologically active agent comprises a carbohydrate.

[0363] Cell penetrating peptide: The terms “cell penetrating peptide”, “cell penetrating protein”, “CPP” and the like, as used herein, refer to a peptide or protein having an ability to pass through cellular membranes. In various embodiments, a CPP is conjugated to a biologically active agent to facilitate transport of the agent across the membrane. In some embodiments, the CPP is useful in facilitating the uptake of such agents across cell membranes, such as the plasma membrane of a mammalian cell and/or the nuclear membrane of a mammalian cell. In some embodiments, a CPP is capable of being internalized into a cell and passing cellular membranes (including, inter alia, the outer “limiting” cell membrane (also commonly referred to as “plasma membrane”), endosomal membranes, and membranes of the endoplasmatic reticulum) and/or directing the passage of a given agent or cargo through these cellular membranes. In some embodiments, any possible mechanism of internalization is envisaged including both energy-dependent (i.e. active) transport mechanisms (e.g., endocytosis) and energy-independent (i.e. passive) transport mechanism (e.g., diffusion). In various embodiments, internalization includes involving the localization of at least a part of the peptides that passed through the plasma cellular membrane into the cytoplasma (in contrast to localization in different cellular compartments such as vesicles, endosomes or in the nucleus). A non-limiting example of a CPP is a peptide having amino acid sequence GRKKRRQRRRPPQ (SEQ ID NO: 9) (Vives; E. et al. (1997), supra). Non-limiting examples of CPPs include the HIV-1 TAT translocation domain (Green; M. and Loewenstein, P. M. (1988) Cell 55, 1179-1188) and the homeodomain of the Antennapedia protein from Drosophila (Joliot; A. et al. (1991) Proc. Natl. Acad. Sci. USA 88, 1864-1868); a sequence of 16 amino acids called penetratin or pAntp of the Antennapedia protein (Derossi, D. et al. (1994) J. Biol. Chem. 269, 10444-10450); a basic sequence of the HIV-1 Tat protein (Vives, E. et al. (1997) J. Biol. Chem. 272, 16010-16017); and a synthetic peptide developed from the amphipathic model peptide MAP (Oehlke, J. et al. (1998) Biochim. Biophys. Acta 1414, 127-139). Additional non-limiting examples of CPPs are described in U.S. Pat. Nos. 9,303,076; and 9,302,014.

[0364] Characteristic portion: As used herein, the phrase a “characteristic portion” or “characteristic sequence”, and the like, of a protein or polypeptide (or nucleic acid) is one that contains a continuous stretch of amino acids (or nucleotides, modified nucleotides or nucleotide analogs), or a collection of continuous stretches of amino acids(or nucleotides, modified nucleotides or nucleotide analogs), that together are characteristic of a protein or polypeptide (or nucleic acid). Each such continuous stretch generally will contain at least two amino acids. Furthermore, those of ordinary skill in the art will appreciate that typically at least 5, 10, 15, 20 or more amino acids (or nucleotides, modified nucleotides or nucleotide analogs) are required to be characteristic of a protein (or nucleic acid). In general, a characteristic portion is one that, in addition to the sequence identity specified above, shares at least one functional characteristic with the relevant intact protein. In some embodiments, a characteristic sequence is a sequence that is found in all members of a family of polypeptides or nucleic acids, and therefore can be used by those of ordinary skill in the art to define members of the family.

[0365] Characteristic structural element: The term “characteristic structural element”, as used herein, refers to a distinctive structural element (e.g., core structure, collection of pendant moieties, sequence element, etc.) that is found in all members of a family of polypeptides, small molecules, or nucleic acids, and therefore can be used by those of ordinary skill in the art to define members of the family.

[0366] Chemotherapeutic agent: The term “chemotherapeutic agent”, as used herein, refers to a drug or agent capable of killing growing cells, including cancer cells. Chemotherapeutic agents are frequently used to treat various forms of cancer. In some embodiments, non-limiting examples of chemotherapeutic agents include adriamycin, paclitaxel (Taxol), docetaxel (Taxotere), actinomycin D, doxorubicin, daunorubicin, valrubicin, idarubicin, epirubicin, bleomycin, plicamycin, camptothecin and derivatives, bleomycin, etoposide, teniposide, mitomycin, vinca alkaloids, such as vinblastine and vincristine, and platinum-based compounds such as cisplatin, gemcitabine. In some embodiments, a composition comprises a lipid and a portion of a chemotherapeutic agent capable of mediating at least one function of a chemotherapeutic agent.

[0367] Comparable: The term “comparable”, as used herein, is used herein to describe two (or more) sets of conditions or circumstances that are sufficiently similar to one another to permit comparison of results obtained or phenomena observed. In some embodiments, comparable sets of conditions or circumstances are characterized by a plurality of substantially identical features and one or a small number of varied features. Those of ordinary skill in the art will appreciate that sets of conditions are comparable to one another when characterized by a sufficient number and type of substantially identical features to warrant a reasonable conclusion that differences in results obtained or phenomena observed under the different sets of conditions or circumstances are caused by or indicative of the variation in those features that are varied.

[0368] Conjugate: The term “conjugate”, as used herein, refers to a composition comprising two or more components, moieties or molecules which are physically linked together, e.g., by a covalent bond, either directly or indirectly (as a non-limiting example, with one or more linkers interposed between two adjacent components, moieties or molecules). The term “conjugated”, as used herein, in reference to a composition comprising two or more components, moieties or molecules, references the state the two or more components, moieties or molecules are physically linked together. In some embodiments, a composition comprises a lipid and a biologically active agent, wherein the lipid and the biologically active agent are conjugated.

[0369] CRISPR: The term “CRISPR”, “CRISPR/Cas system” and the like, as used herein, refers to a biologically active system involving clustered regularly-interspaced short palindromic repeats (CRISPR), which are segments of prokaryotic DNA containing short repetitions of base sequences, or various artificial systems derived from or inspired by the naturally-occurring prokaryotic system. In some embodiments, a biologically active agent comprises a component of a CRISPR/Cas system. In some embodiments, a component of a CRISPR/Cas system includes, without limitation: a gene encoding a Cas protein (including, as non-limiting examples, Cas9, dCas9, and variants thereof, both naturally-occurring and artificial) or the protein itself; a guide RNA; any component of a CAS crRNA complex; a cas (CRISPR-associated) gene or gene product; and any other biologically active molecule involved in a naturally-occurring or artificial CRISPR/Cas system. See, for example, Jinek et al. 2012 Science 337: 816-821; Cong et al. 2013 Science 339: 819-823; U.S. Pat. App. 20140234972; DiCarlo 2013 Nucl. Acids Res. 41: 4336-43; Hwang et al. 2013 Nat. Biotech. 31: 227-9; and Flowers et al. 2014 Development 141: 2165-71.

[0370] Cycloaliphatic: The term “cycloaliphatic,” as used herein, refers to saturated or partially unsaturated aliphatic monocyclic, bicyclic, or polycyclic ring systems having, e.g., from 3 to 30, members, wherein the aliphatic ring system is optionally substituted. Cycloaliphatic groups include, without limitation, cyclopropyl, cyclobutyl, cyclopentyl, cyclopentenyl, cyclohexyl, cyclohexenyl, cycloheptyl, cycloheptenyl, cyclooctyl, cyclooctenyl, norbornyl, adamantyl, and cyclooctadienyl. In some embodiments, the cycloalkyl has 3-6 carbons. The terms “cycloaliphatic” can also include aliphatic rings that are fused to one or more aromatic or nonaromatic rings, such as decahydronaphthyl or tetrahydronaphthyl, where the radical or point of attachment is on the aliphatic ring. In some embodiments, a carbocyclic group is bicyclic. In some embodiments, a carbocyclic group is tricyclic. In some embodiments, a carbocyclic group is polycyclic. In some embodiments, “cycloaliphatic” (or “carbocycle” or “cycloalkyl”) refers to a monocyclic C3-C6 hydrocarbon, or a C8-C10 bicyclic hydrocarbon that is completely saturated or that contains one or more units of unsaturation, but which is not aromatic, that has a single point of attachment to the rest of the molecule, or a C9-C16 tricyclic hydrocarbon that is completely saturated or that contains one or more units of unsaturation, but which is not aromatic, that has a single point of attachment to the rest of the molecule.

[0371] Dosing regimen: As used herein, a “dosing regimen” or “therapeutic regimen” refers to a set of unit doses (typically more than one) that are administered individually to a subject, typically separated by periods of time. In some embodiments, a given therapeutic agent has a recommended dosing regimen, which can involve one or more doses. In some embodiments, a dosing regimen comprises a plurality of doses each of which are separated from one another by a time period of the same length; in some embodiments, a dosing regime comprises a plurality of doses and at least two different time periods separating individual doses. In some embodiments, all doses within a dosing regimen are of the same unit dose amount. In some embodiments, different doses within a dosing regimen are of different amounts. In some embodiments, a dosing regimen comprises a first dose in a first dose amount, followed by one or more additional doses in a second dose amount different from the first dose amount. In some embodiments, a dosing regimen comprises a first dose in a first dose amount, followed by one or more additional doses in a second dose amount same as the first dose amount.

[0372] Equivalent agents: The term “equivalent agent”, as used herein,” refers to a molecule, compound or other agent which is capable of functionally substituting for another molecule, compound or agent, even if the structures of the molecules, compounds or agents are not similar, identical or related. Those of ordinary skill in the art, reading the present disclosure, will appreciate that the scope of useful agents in the context of the present disclosure is not limited to those specifically mentioned or exemplified herein. In particular, those skilled in the art will recognize that active agents typically have a structure that consists of a core and attached pendant moieties, and furthermore will appreciate that simple variations of such core and/or pendant moieties may not significantly alter activity of the agent. For example, in some embodiments, substitution of one or more pendant moieties with groups of comparable three-dimensional structure and/or chemical reactivity characteristics can generate a substituted compound or portion equivalent to a parent reference compound or portion. In some embodiments, addition or removal of one or more pendant moieties can generate a substituted compound equivalent to a parent reference compound. In some embodiments, alteration of core structure, for example by addition or removal of a small number of bonds (typically not more than 5, 4, 3, 2, or 1 bonds, and often only a single bond) can generate a substituted compound equivalent to a parent reference compound. In many embodiments, equivalent compounds can be prepared by methods illustrated in general reaction schemes as, for example, described below, or by modifications thereof, using readily available starting materials, reagents and conventional or provided synthesis procedures. In these reactions, it is also possible to make use of variants, which are in themselves known, but are not mentioned here.

[0373] Equivalent Dosage: The term “equivalent dosage”, as used herein, is used herein to compare dosages of different pharmaceutically active agents that effect the same biological result. Dosages of two different agents are considered to be “equivalent” to one another in accordance with the present disclosure if they achieve a comparable level or extent of the biological result. In some embodiments, equivalent dosages of different pharmaceutical agents for use in accordance with the present disclosure are determined using in vitro and/or in vivo assays as described herein. In some embodiments, one or more lysosomal activating agents for use in accordance with the present disclosure is utilized at a dose equivalent to a dose of a reference lysosomal activating agent; in some such embodiments, the reference lysosomal activating agent for such purpose is selected from the group consisting of small molecule allosteric activators (e.g., pyrazolpyrimidines), imminosugars (e.g., isofagomine), antioxidants (e.g., n-acetyl-cysteine), and regulators of cellular trafficking (e.g., Rabla polypeptide).

[0374] Halogen: The term “halogen”, as used herein, means F, Cl, Br, or I.

[0375] Heteroaliphatic: The term “heteroaliphatic”, as used herein, is given its ordinary meaning in the art and refers to aliphatic groups as described herein in which one or more carbon atoms are independently replaced with one or more heteroatoms (e.g., oxygen, nitrogen, sulfur, silicon, phosphorus, and the like). In some embodiments, one or more units selected from C, CH, CH₂, or CH₃ are independently replaced by one or more heteroatoms (including oxidized and/or substituted form thereof). In some embodiments, a heteroaliphatic group is heteroalkyl. In some embodiments, a heteroaliphatic group is heteroalkenyl.

[0376] Heteroalkyl: The term “heteroalkyl”, as used herein, is given its ordinary meaning in the art and refers to alkyl groups as described herein in which one or more carbon atoms are independently replaced with one ore more heteroatoms (e.g., oxygen, nitrogen, sulfur, silicon, phosphorus, and the like). Examples of heteroalkyl groups include, but are not limited to, alkoxy, poly(ethylene glycol)-, alkyl-substituted amino, tetrahydrofuranyl, piperidinyl, morpholinyl, etc.

[0377] Heteroaryl: The terms “heteroaryl” and “heteroar-”, as used herein, used alone or as part of a larger moiety, e.g., “heteroaralkyl,” or “heteroaralkoxy,” refer to monocyclic, bicyclic or polycyclic ring systems having a total of five to thirty ring members, wherein at least one ring in the system is aromatic and at least one aromatic ring atom is a heteroatom. In some embodiments, a heteroaryl group is a group having 5 to 10 ring atoms (i.e., monocyclic, bicyclic or polycyclic), in some embodiments 5, 6, 9, or 10 ring atoms. In some embodiments, a heteroaryl group has 6, 10, or 14 pi electrons shared in a cyclic array; and having, in addition to carbon atoms, from one to five heteroatoms. Heteroaryl groups include, without limitation, thienyl, furanyl, pyrrolyl, imidazolyl, pyrazolyl, triazolyl, tetrazolyl, oxazolyl, isoxazolyl, oxadiazolyl, thiazolyl, isothiazolyl, thiadiazolyl, pyridyl, pyridazinyl, pyrimidinyl, pyrazinyl, indolizinyl, purinyl, naphthyridinyl, and pteridinyl. In some embodiments, a heteroaryl is a heterobiaryl group, such as bipyridyl and the like. The terms “heteroaryl” and “heteroar-”, as used herein, also include groups in which a heteroaromatic ring is fused to one or more aryl, cycloaliphatic, or heterocyclyl rings, where the radical or point of attachment is on the heteroaromatic ring. Non-limiting examples include indolyl, isoindolyl, benzothienyl, benzofuranyl, dibenzofuranyl, indazolyl, benzimidazolyl, benzthiazolyl, quinolyl, isoquinolyl, cinnolinyl, phthalazinyl, quinazolinyl, quinoxalinyl, 4H-quinolizinyl, carbazolyl, acridinyl, phenazinyl, phenothiazinyl, phenoxazinyl, tetrahydroquinolinyl, tetrahydroisoquinolinyl, and pyrido[2,3-b]-1,4-oxazin-3(4H)-one. A heteroaryl group can be monocyclic, bicyclic or polycyclic. The term “heteroaryl” can be used interchangeably with the terms “heteroaryl ring,” “heteroaryl group,” or “heteroaromatic,” any of which terms include rings that are optionally substituted. The term “heteroaralkyl” refers to an alkyl group substituted by a heteroaryl group, wherein the alkyl and heteroaryl portions independently are optionally substituted.

[0378] Heteroatom: The term “heteroatom”, as used herein, means an atom that is not carbon or hydrogen. In some embodiments, a heteroatom is oxygen, sulfur, nitrogen, phosphorus, or silicon (including any oxidized form of nitrogen, sulfur, phosphorus, or silicon; the quaternized form of any basic nitrogen or a substitutable nitrogen of a heterocyclic ring (for example, N as in 3,4-dihydro-2H-pyrrolyl), NH (as in pyrrolidinyl) or NR+(as in N-substituted pyrrolidinyl); etc.).

[0379] Heterocyclyl: As used herein, the terms “heterocycle,” “heterocyclyl,” “heterocyclic radical,” and “heterocyclic ring”, as used herein, are used interchangeably and refer to a monocyclic, bicyclic or polycyclic ring moiety (e.g., 3-30 membered) that is saturated or partially unsaturated and has one or more heteroatom ring atoms. In some embodiments, a heterocyclyl group is a stable 5- to 7-membered monocyclic or 7- to 10-membered bicyclic heterocyclic moiety that is either saturated or partially unsaturated, and having, in addition to carbon atoms, one or more, preferably one to four, heteroatoms, as defined above. When used in reference to a ring atom of a heterocycle, the term “nitrogen” includes substituted nitrogen. As an example, in a saturated or partially unsaturated ring having 0-3 heteroatoms selected from oxygen, sulfur or nitrogen, the nitrogen can be N (as in 3,4-dihydro-2H-pyrrolyl), NH (as in pyrrolidinyl), or +NR (as in N-substituted pyrrolidinyl). A heterocyclic ring can be attached to its pendant group at any heteroatom or carbon atom that results in a stable structure and any of the ring atoms can be optionally substituted. Examples of such saturated or partially unsaturated heterocyclic radicals include, without limitation, tetrahydrofuranyl, tetrahydrothienyl, pyrrolidinyl, piperidinyl, pyrrolinyl, tetrahydroquinolinyl, tetrahydroisoquinolinyl, decahydroquinolinyl, oxazolidinyl, piperazinyl, dioxanyl, dioxolanyl, diazepinyl, oxazepinyl, thiazepinyl, morpholinyl, and quinuclidinyl. The terms “heterocycle,” “heterocyclyl,” “heterocyclyl ring,” “heterocyclic group,” “heterocyclic moiety,” and “heterocyclic radical,” are used interchangeably herein, and also include groups in which a heterocyclyl ring is fused to one or more aryl, heteroaryl, or cycloaliphatic rings, such as indolinyl, 3H-indolyl, chromanyl, phenanthridinyl, or tetrahydroquinolinyl. A heterocyclyl group can be monocyclic, bicyclic or polycyclic. The term “heterocyclylalkyl” refers to an alkyl group substituted by a heterocyclyl, wherein the alkyl and heterocyclyl portions independently are optionally substituted.

[0380] Immunomodulatory nucleic acid and CpG oligonucleotide and related terms: The term “immunomodulatory nucleic acid”, as used herein, refers to a nucleic acid which is capable of modulating an immune response, e.g., in a mammal, e.g., in a human subject. In various embodiments, the immunomodulatory nucleic acid is capable of stimulating (agonizing) an immune response; in other embodiments, different immunomodulatory nucleic acids are capable of decreasing (antagonizing) an immune response. In non-limiting examples, an immunomodulatory nucleic acid includes a CpG oligonucleotide. The term “CpG oligonucleotide”, as used herein, refers to an oligonucleotide or other nucleic acid comprising a CpG motif, wherein the oligonucleotide can comprise nucleotides, modified nucleotides and/or nucleotide analogs. In some embodiments, a CpG oligonucleotide is capable of agonizing a TLR9-mediated and/or TLR9-associated immune response in at least one assay; in some embodiments, a CpG oligonucleotide is capable of antagonizing an immune response in at least one assay. Others do neither. In some embodiments, a CpG oligonucleotide can optionally comprise modifications of the sugar, base or phosphate (phosphodiester), as well as secondary and tertiary structures. See, for example, Vollmer et al. 2009 Adv. Drug. Del. Rev. 61: 195-204. In some embodiments, an example of a modified phosphodiester is a phosphorothioate. In some embodiments, one or more phosphorothioates (PS) is incorporated into the backbone of a CpG oligonucleotide (in place of a phosphodiester or PO); the PS can reportedly reduce nuclease degradation and, in at least some cases, enhance the immunogenic activity of the CpG oligonucleotide 10- to 100-fold. Vollmer et al. 2009 Adv. Drug Del. Rev. 61: 195-204. In some embodiments, a CpG oligonucleotide can comprise all phosphodiesters in the backbone; or a mixture of phosphodiesters and internucleoside linkers in the backbone; or all internucleoside linkers in the backbone. For example, WO 2015/108047 reports CpG oligonucleotides with a mixture of phosphodiester and internucleoside (e.g., phosphorothioate) linkages; in this case, the CpG region motif comprises phosphodiesters, with phosphorothioates flanking the CpG region motif. In various embodiments, the CpG oligonucleotide can comprise a phosphorothioate which is in the Rp or Sp conformation. The terms “CpG ODN” or “CpG oligodeoxynucleotide” as used in the literature, and as used herein, are not strictly limited to oligonucleotides wherein “p” is a phosphate; these terms have previously been used in the literature and are used herein to encompass oligonucleotides which comprise one or more phosphorothioates in place of phosphodiesters, or even comprise all phosphorothioates in their backbones, and/or other modifications. In some embodiments, an “immunostimulatory” CpG oligonucleotide is capable of agonizing an immune response. In some embodiments, a CpG oligonucleotide can comprise one strand; or, optionally, it can further comprise a second or other additional strands. In some embodiments, a CpG oligonucleotide can further comprise or be conjugated to other components which are not nucleotides. In some embodiments, a composition comprises a lipid and a portion of an immunomodulatory nucleic acid capable of mediating at least one function of an immunomodulatory nucleic acid. In some embodiments, an immunomodulatory activity is the activity of a molecule, including but not limited to an oligonucleotide, to agonize or antagonize an immune response.

[0381] Immunostimulatory: The term “immunostimulatory”, as used herein, refers to a biologically active agent, as a non-limiting example, a CpG oligonucleotide, which has or is capable of having an agonistic effect on at least one immune response.

[0382] Intraperitoneal: The phrases “intraperitoneal administration” and “administered intraperitonealy” as used herein have their art-understood meaning referring to administration of a compound or composition into the peritoneum of a subject.

[0383] In vitro: As used herein, the term “in vitro” refers to events that occur in an artificial environment, e.g., in a test tube or reaction vessel, in cell culture, etc., rather than within an organism (e.g., animal, plant, and/or microbe).

[0384] In vivo: As used herein, the term “in vivo” refers to events that occur within an organism (e.g., animal, plant, and/or microbe).

[0385] Linker: The term “linker”, as used herein, refers to a moiety that connects two parts of a composition; as a non-limiting example, a linker physically connects a nucleic acid (including, but not limited to, a CpG oligonucleotide) to a lipid. Non-limiting examples of suitable linkers include: an uncharged linker; a charged linker; a linker comprising an alkyl; a linker comprising a phosphate; a branched linker; an unbranched linker; a linker comprising at least one cleavage group; a linker comprising at least one redox cleavage group; a linker comprising at least one phosphate-based cleavage group; a linker comprising at least one acid-cleavage group; a linker comprising at least one ester-based cleavage group; a linker comprising at least one peptide-based cleavage group. Other non-limiting examples of linkers are described herein, or detailed in FIG. 7.

[0386] Linking moiety: The term “linking moiety”, as used herein, refers to a moiety which links one molecule to another. In some embodiments, a linking moiety is a moiety optionally positioned between the terminal nucleoside and the solid support or between the terminal nucleoside and another nucleoside, nucleotide, or nucleic acid.

[0387] Lower alkyl: The term “lower alkyl”, as used herein, refers to a C1-4 straight or branched alkyl group. Example lower alkyl groups are methyl, ethyl, propyl, isopropyl, butyl, isobutyl, and tert-butyl.

[0388] Lipid: The term “lipid”, as used herein, refers to any member of a large group of molecules which are generally at least partially hydrophobic or amphiphilic, and include, inter alia, phospholipids, triglycerides, diglycerides, monoglycerides, fat-soluble vitamins, sterols, fats and waxes. In some embodiments, lipids include fatty acids, glycerolipids, glycerophospholipids, sphingolipids, sterol lipids, prenol lipids, saccharolipids, polyketides, and other molecules. In some embodiments, a lipid comprises a linear, saturated or partially unsaturated aliphatic chain, for example having a length within the range of C₁₀-C₈₀, or C₁₀-C₆₀, or C₁₀-C₄₀. In some embodiments, a lipid may comprise such a linear, saturated or partially unsaturated aliphatic chain that is optionally substituted with one or more C₁₋₄ aliphatic groups. In some embodiments, a lipid includes, without limitation, lauric acid, myristic acid, palmitic acid, stearic acid, oleic acid, linoleic acid, alpha-linolenic acid, gamma-linolenic acid, docosahexaenoic acid (cis-DHA), turbinaric acid and dilinoleyl. In some embodiments, a lipid includes, without limitation: an amino lipid; an amphipathic lipid; an anionic lipid; an apolipoprotein; a cationic lipid; a low molecular weight cationic lipid; a cationic lipid such as CLinDMA and DLinDMA; an ionizable cationic lipid; a cloaking component; a helper lipid; a lipopeptide; a neutral lipid; a neutral zwitterionic lipid; a hydrophobic small molecule; a hydrophobic vitamin; a PEG-lipid; an uncharged lipid modified with one or more hydrophilic polymers; phospholipid; a phospholipid such as 1,2-dioleoyl-sn-glycero-3-phosphoethanolamine; a stealth lipid; a sterol; a cholesterol; and a targeting lipid; and any other lipid described herein or reported in the art. In some embodiments, a composition comprises a lipid and a portion of another lipid capable of mediating at least one function of another lipid. In various embodiments, a composition of the present disclosure comprises any one or more of any lipid described herein or known in the art.

[0389] lncRNA: The terms “Long non-coding RNA” and “lncRNA”, as used herein, refer to non-protein coding RNA transcripts longer than about 200 nucleotides. This numerical limit distinguishes long ncRNAs from small regulatory RNAs such as microRNAs (miRNAs), short interfering RNAs (siRNAs), Piwi-interacting RNAs (piRNAs), small nucleolar RNAs (snoRNAs), and other short RNAs. In some embodiments, a lncRNA bears one or more signatures of mRNAs, including 5′ capping, splicing, and poly-adenylation, but has little or no open reading frame (ORF). In some embodiments, a lncRNA is Air or Xist. In some embodiments, a lncRNA functions in regulating expression of another gene. In some embodiments, a lncRNA is a lncRNA listed in any lncRNA database, including, but not limited to: ChIPBase, C-It-Loci, LNCipedia, lncRNABase, lncRNAdb, lncRNome, MONOCLdb, NONCODE, and NRED. In some embodiments, a composition comprises a lipid and a portion of a lncRNA capable of mediating at least one function of a lncRNA.

[0390] mRNA: The terms “Messenger RNA”, “mRNA” and the like, as used herein, refer to any of a large family of RNA molecules that convey genetic information from DNA to the ribosome, where they specify the amino acid sequence of the protein products of gene expression. In various embodiments, following transcription of primary transcript mRNA (known as pre-mRNA) by RNA polymerase, processed, mature mRNA is translated into a polymer of amino acids: a protein, as summarized in the central dogma of molecular biology. In some embodiments, the mRNA includes a modified mRNA or mmRNA. U.S. Pat. No. 9,220,792. In some embodiments, a mRNA encodes any of: an allergen, a blood component, a gene therapy product, a human tissue or cellular product used in transplantation, a vaccine, an antibody, a cytokine, a growth factor, an enzyme, a thrombolytic, or an immunomodulator. In some embodiments, a composition comprises a lipid and a portion of a mRNA capable of mediating at least one function of a mRNA.

[0391] ncRNA: The term “ncRNA”, as used herein, refers to non-coding RNA, of which there are several types, including, but not limited to lncRNA (long non-coding RNA). In some embodiments, a ncRNA participates in regulating the expression of a gene or protein or gene product. Wahlestedt 2013 Nat. Rev. Drug Disc. 12: 433-446. Antagonists to ncRNAs have been reported. Meng et al. 2015 Nature 518: 409-412; and Ling et al. 2013 Nature Rev. Drug Discov. 12: 847-865. In some embodiments, a composition comprises a nucleic acid (including, but not limited to, a CpG oligonucleotide) and a lipid.

[0392] Optionally Substituted: As described herein, compounds, e.g., oligonucleotides, of the disclosure can contain optionally substituted and/or substituted moieties. In general, the term “substituted,” whether preceded by the term “optionally” or not, means that one or more hydrogens of the designated moiety are replaced with a suitable substituent. Unless otherwise indicated, an “optionally substituted” group can have a suitable substituent at each substitutable position of the group, and when more than one position in any given structure can be substituted with more than one substituent selected from a specified group, the substituent can be either the same or different at every position. In some embodiments, an optionally substituted group is unsubstituted. Combinations of substituents envisioned by this disclosure are preferably those that result in the formation of stable or chemically feasible compounds. The term “stable,” as used herein, refers to compounds that are not substantially altered when subjected to conditions to allow for their production, detection, and, in certain embodiments, their recovery, purification, and use for one or more of the purposes disclosed herein.

[0393] Suitable monovalent substituents include halogen; —(CH₂)₀₋₄R^{o}; —(CH₂)₀₋₄OR^{o}; —O(CH₂)₀₋₄R^{o}, —O—(CH₂)₀₋₄C(O)OR^{o}; —(CH₂)₀₋₄CH(OR^{o})₂; —(CH₂)₀₋₄Ph, which can be substituted with R^{o}; —(CH₂)₀₋₄O(CH₂)₀₋₁Ph which can be substituted with R^{o}; —CH═CHPh, which can be substituted with R^{o}; —(CH₂)₀₋₄O(CH₂)₀₋₁-pyridyl which can be substituted with R^{o}; —NO₂; —CN; —N₃; —(CH₂)₀₋₄N(R^{o})₂; —(CH₂)₀₋₄N(R^{o})C(O)R^{o}; —N(R^{o})C(S)R^{o}; —(CH₂)₀₋₄N(R^{o})C(O)NR^{o}₂; —N(R^{o})C(S)NR^{o}₂; —(CH₂)₀₋₄N(R^{o})C(O)OR^{o}; —N(R^{o})N(R^{o})C(O)R^{o}; —N(R^{o})N(R^{o})C(O)NR^{o}₂; —N(R^{o})N(R^{o})C(O)OR^{o}; —(CH₂)₀₋₄C(O)R^{o}; —C(S)R^{o}; —(CH₂)₀₋₄C(O)OR^{o}; —(CH₂)₀₋₄C(O)SR^{o}; —(CH₂)₀₋₄C(O)OSiR^{o}₃; —(CH₂)₀₋₄OC(O)R^{o}; —OC(O)(CH₂)₀₋₄SR, —SC(S)SR^{o}; —(CH₂)₀₋₄SC(O)R^{o}; —(CH₂)₀₋₄C(O)NR^{o}₂; —C(S)NR^{o}₂; —C(S)SR^{o}; —SC(S)SR^{o}, —(CH₂)₀₋₄OC(O)NR^{o}₂; —C(O)N(OR^{o})R^{o}; —C(O)C(O)R^{o}; —C(O)CH₂C(O)R^{o}; —C(NOR^{o})R^{o}; —(CH₂)₀₋₄SSR^{o}; —(CH₂)₀₋₄S(O)₂R^{o}; —(CH₂)₀₋₄S(O)₂OR^{o}; —(CH₂)₀₋₄OS(O)₂R^{o}; —S(O)₂NR^{o}₂; —(CH₂)₀₋₄S(O)R^{o}; —N(R^{o})S(O)₂NR^{o}₂; —N(R^{o})S(O)₂R^{o}; —N(OR^{o})R^{o}; —C(NH)NR^{o}₂; —P(O)₂R^{o}; —P(O)R^{o}₂; —OP(O)R^{o}₂; —OP(O)(OR^{o})₂; —SiR^{o}₃; —OSiR^{o}₃; —(C₁₋₄ straight or branched alkylene)O—N(R^{o})₂; or —(C₁₋₄ straight or branched alkylene)C(O)O—N(R^{o})₂, wherein each R^{o} can be substituted as defined below and is independently hydrogen, C₁₋₂₀ aliphatic, C₁₋₂₀ heteroaliphatic having 1-5 heteroatoms independently selected from nitrogen, oxygen, sulfur, silicon and phosphorus, —CH₂—(C₆₋₁₄ aryl), —O(CH₂)₀₋₁(C₆₋₁₄ aryl), —CH₂-(5-14 membered heteroaryl ring), a 5-20 membered, monocyclic, bicyclic, or polycyclic, saturated, partially unsaturated or aryl ring having 0-5 heteroatoms independently selected from nitrogen, oxygen, sulfur, silicon and phosphorus, or, notwithstanding the definition above, two independent occurrences of R^{o}, taken together with their intervening atom(s), form a 5-20 membered, monocyclic, bicyclic, or polycyclic, saturated, partially unsaturated or aryl ring having 0-5 heteroatoms independently selected from nitrogen, oxygen, sulfur, silicon and phosphorus, which can be substituted as defined below.

[0394] Suitable monovalent substituents on R^{o} (or the ring formed by taking two independent occurrences of R^{o} together with their intervening atoms), are independently halogen, —(CH₂)₀₋₂R^{●}, -(haloR^{●}), —(CH₂)₀₋₂OH, —(CH₂)₀₋₂OR^{●}, —(CH₂)₀₋₂CH(OR*)₂; —O(haloR^{●}), —CN, —N₃, —(CH₂)₀₋₂C(O)R^{●}, —(CH₂)₀₋₂C(O)OH, —(CH₂)₀₋₂C(O)OR^{●}, —(CH₂)₀₋₂SR^{●}, —(CH₂)₀₋₂SH, —(CH₂)₀₋₂NH₂, —(CH₂)₀₋₂NHR^{●}, —(CH₂)₀₋₂NR^{●}₂, —NO₂, —SiR^{●}₃, —OSiR^{●}₃, —C(O)SR^{●}, —(C₁₋₄ straight or branched alkylene)C(O)OR^{●}, or —SSR^{●} wherein each R^{●} is unsubstituted or where preceded by “halo” is substituted only with one or more halogens, and is independently selected from C₁₋₄ aliphatic, —CH₂Ph, —O(CH₂)₀₋₁Ph, or a 5-6-membered saturated, partially unsaturated, or aryl ring having 0-4 heteroatoms independently selected from nitrogen, oxygen, and sulfur. Suitable divalent substituents on a saturated carbon atom of R^{o} include ═O and ═S.

[0395] Suitable divalent substituents include the following: ═O, ═S, ═NNR*₂, ═NNHC(O)R*, ═NNHC(O)OR^{●}, ═NNHS(O)₂R*, ═NR*, ═NOR*, —O(C(R*₂))₂₋₃O—, or —S(C(R*₂))₂₋₃S—, wherein each independent occurrence of R* is selected from hydrogen, C₁₋₆ aliphatic which can be substituted as defined below, or an unsubstituted 5-6-membered saturated, partially unsaturated, or aryl ring having 0-4 heteroatoms independently selected from nitrogen, oxygen, and sulfur. Suitable divalent substituents that are bound to vicinal substitutable carbons of an “optionally substituted” group include: —O(CR*₂)₂₋₃O—, wherein each independent occurrence of R* is selected from hydrogen, C₁₋₆ aliphatic which can be substituted as defined below, or an unsubstituted 5-6-membered saturated, partially unsaturated, or aryl ring having 0-4 heteroatoms independently selected from nitrogen, oxygen, and sulfur.

[0396] Suitable substituents on the aliphatic group of R* include halogen, —R^{●}, -(haloR^{●}), —OH, —OR^{●}, —O(haloR^{●}), —CN, —C(O)OH, —C(O)OR^{●}, —NH₂, —NHR^{●}, —NR^{●}₂, or —NO₂, wherein each R^{●} is unsubstituted or where preceded by “halo” is substituted only with one or more halogens, and is independently C₁₋₄ aliphatic, —CH₂Ph, —O(CH₂)₀₋₁Ph, or a 5-6-membered saturated, partially unsaturated, or aryl ring having 0-4 heteroatoms independently selected from nitrogen, oxygen, and sulfur.

[0397] In some embodiments, suitable substituents on a substitutable nitrogen include —R^{†}, —NR^{†}₂, —C(O)R^{†}, —C(O)OR^{†}, —C(O)C(O)R^{†}, —C(O)CH₂C(O)R^{†}, —S(O)₂R^{†}, —S(O)₂NR^{†}₂, —C(S)NR^{†}₂, —C(NH)NR^{†}₂, or —N(R^{†})S(O)₂R^{†}; wherein each R^{†} is independently hydrogen, C₁₋₆ aliphatic which can be substituted as defined below, unsubstituted —OPh, or an unsubstituted 5-6-membered saturated, partially unsaturated, or aryl ring having 0-4 heteroatoms independently selected from nitrogen, oxygen, and sulfur, or, notwithstanding the definition above, two independent occurrences of Rt, taken together with their intervening atom(s) form an unsubstituted 3-12-membered saturated, partially unsaturated, or aryl mono- or bicyclic ring having 0-4 heteroatoms independently selected from nitrogen, oxygen, and sulfur.

[0398] Suitable substituents on the aliphatic group of R^{†} are independently halogen, —R^{●}, -(haloR^{●}), —OH, —OR^{●}, —O(haloR^{●}), —CN, —C(O)OH, —C(O)OR^{●}, —NH₂, —NHR^{●}, —NR^{●}₂, or —NO₂, wherein each R* is unsubstituted or where preceded by “halo” is substituted only with one or more halogens, and is independently C₁₋₄ aliphatic, —CH₂Ph, —O(CH₂)₀₋₁Ph, or a 5-6-membered saturated, partially unsaturated, or aryl ring having 0-4 heteroatoms independently selected from nitrogen, oxygen, and sulfur.

[0399] Oral: The phrases “oral administration” and “administered orally” as used herein have their art-understood meaning referring to administration by mouth of a compound or composition.

[0400] Parenteral: The phrases “parenteral administration” and “administered parenterally” as used herein have their art-understood meaning referring to modes of administration other than enteral and topical administration, usually by injection, and include, without limitation, intravenous, intramuscular, intraarterial, intrathecal, intracapsular, intraorbital, intracardiac, intradermal, intraperitoneal, transtracheal, subcutaneous, subcuticular, intraarticulare, subcapsular, subarachnoid, intraspinal, and intrasternal injection and infusion.

[0401] Partially unsaturated: As used herein, the term “partially unsaturated” refers to a moiety that includes at least one double or triple bond. The term “partially unsaturated” is intended to encompass groups having multiple sites of unsaturation, but is not intended to include aryl or heteroaryl moieties.

[0402] Peptide: The term “peptide”, as used herein, refers to a molecule comprising a plurality of amino acids joined together via peptide bonds. In some embodiments, a peptide includes a dipeptide, tripeptide, oligopeptide and polypeptide. In some embodiments, a dipeptide contains two amino acids; a tripeptide contains three amino acids; and an oligopeptide comprises about 2 to about 50 or more amino acids. In some embodiments, peptides comprise more than about 50 amino acids. In some embodiments, a polypeptide and a protein are also molecules comprising a plurality of amino acids joined together via peptide bonds. In some embodiments, a peptide includes any therapeutic peptide listed in the SATPdb database of therapeutic peptides. Singh et al. 2015 Nucl. Acids Res. doi: 10.1093/nar/gkv1114. In some embodiments, a composition comprises a lipid and a portion of a peptide capable of mediating at least one function of a peptide.

[0403] Pharmaceutical composition: As used herein, the term “pharmaceutical composition” refers to an active agent, formulated together with one or more pharmaceutically acceptable carriers. In some embodiments, active agent is present in unit dose amount appropriate for administration in a therapeutic regimen that shows a statistically significant probability of achieving a predetermined therapeutic effect when administered to a relevant population. In some embodiments, pharmaceutical compositions can be specially formulated for administration in solid or liquid form, including those adapted for the following: oral administration, for example, drenches (aqueous or non-aqueous solutions or suspensions), tablets, e.g., those targeted for buccal, sublingual, and systemic absorption, boluses, powders, granules, pastes for application to the tongue; parenteral administration, for example, by subcutaneous, intramuscular, intravenous or epidural injection as, for example, a sterile solution or suspension, or sustained-release formulation; topical application, for example, as a cream, ointment, or a controlled-release patch or spray applied to the skin, lungs, or oral cavity; intravaginally or intrarectally, for example, as a pessary, cream, or foam; sublingually; ocularly; transdermally; or nasally, pulmonary, and to other mucosal surfaces.

[0404] Pharmaceutically acceptable: As used herein, the phrase “pharmaceutically acceptable” refers to those compounds, materials, compositions, and/or dosage forms which are, within the scope of sound medical judgment, suitable for use in contact with the tissues of human beings and animals without excessive toxicity, irritation, allergic response, or other problem or complication, commensurate with a reasonable benefit/risk ratio.

[0405] Pharmaceutically acceptable carrier: As used herein, the term “pharmaceutically acceptable carrier” means a pharmaceutically-acceptable material, composition or vehicle, such as a liquid or solid filler, diluent, excipient, or solvent encapsulating material, involved in carrying or transporting the subject compound from one organ, or portion of the body, to another organ, or portion of the body. Each carrier must be “acceptable” in the sense of being compatible with the other ingredients of the formulation and not injurious to the patient. Some examples of materials which can serve as pharmaceutically-acceptable carriers include: sugars, such as lactose, glucose and sucrose; starches, such as corn starch and potato starch; cellulose, and its derivatives, such as sodium carboxymethyl cellulose, ethyl cellulose and cellulose acetate; powdered tragacanth; malt; gelatin; talc; excipients, such as cocoa butter and suppository waxes; oils, such as peanut oil, cottonseed oil, safflower oil, sesame oil, olive oil, corn oil and soybean oil; glycols, such as propylene glycol; polyols, such as glycerin, sorbitol, mannitol and polyethylene glycol; esters, such as ethyl oleate and ethyl laurate; agar; buffering agents, such as magnesium hydroxide and aluminum hydroxide; alginic acid; pyrogen-free water; isotonic saline; Ringer's solution; ethyl alcohol; pH buffered solutions; polyesters, polycarbonates and/or polyanhydrides; and other non-toxic compatible substances employed in pharmaceutical formulations. In some embodiments, a pharmaceutically acceptable carrier includes: any compounds, materials, compositions, and/or dosage forms which are, within the scope of sound medical judgment, suitable for use in contact with the tissues of human beings and animals without excessive toxicity, irritation, allergic response, or other problem or complication, commensurate with a reasonable benefit/risk ratio. A carrier can enable a composition comprising a CpG oligonucleotide to be formulated as tablets to be taken orally by a subject to be targeted, pills, dragees, capsules, liquids, gels, syrups, slurries, suspensions and the like. The pharmaceutical preparations for oral administration can be obtained as solid excipient by adding suitable auxiliaries if necessary, subsequently grounding the resulting mixture and forming the tablet cores or the dragee cores by processing the mixture of granules. In particular, suitable excipients are fillers [for example, sugar (lactose, sucrose, mannitol and sorbitol, etc.); cellulose preparations (for example, corn starch, wheat starch, Rice starch, potato starch, gelatin, tragacanth gum, methyl cellulose, hydroxypropyl methyl-cellulose, sodium carboxymethyl-cellulose, etc.) and/or polyvinylpyrrolidone (PVP)]. If necessary, a disintegrating agent [for example, cross-linked polyvinyl pyrrolidone, agar, alginic acid or a salt thereof (for example, sodium alginate), etc.] can be added. If necessary, the oral formulations can also be administered in saline or buffer solution to neutralize the acidic internal state. In addition, the oral formulations can be administered without any carriers. A dragee core can be provided with suitable coatings. For this purpose, concentrated sugar solutions can be used. If necessary, the concentrated sugar solutions can contain gum arabic, talc, polyvinyl pyrrolidone, carbopol gel, polyethylene glycol and/or titanium dioxide, lacquer solutions, suitable organic solvents or solvent mixtures. In order to identify or characterize different combinations of active compound doses, dyestuffs or pigments can be added to the tablets or the dragee coatings. A pharmaceutically acceptable carrier can comprise a pharmaceutically acceptable salt. The term “pharmaceutically acceptable salt”, as used herein, refers to salts of such compounds that are appropriate for use in pharmaceutical contexts, i.e., salts which are, within the scope of sound medical judgment, suitable for use in contact with the tissues of humans and lower animals without undue toxicity, irritation, allergic response and the like, and are commensurate with a reasonable benefit/risk ratio. Pharmaceutically acceptable salts are well known in the art.

[0406] Pharmaceutically acceptable salt: The term “pharmaceutically acceptable salt”, as used herein, refers to salts of such compounds that are appropriate for use in pharmaceutical contexts, i.e., salts which are, within the scope of sound medical judgment, suitable for use in contact with the tissues of humans and lower animals without undue toxicity, irritation, allergic response and the like, and are commensurate with a reasonable benefit/risk ratio. Pharmaceutically acceptable salts are well known in the art. For example, S. M. Berge, et al. describes pharmaceutically acceptable salts in detail in J. Pharmaceutical Sciences, 66: 1-19 (1977). In some embodiments, pharmaceutically acceptable salt include, but are not limited to, nontoxic acid addition salts, which are salts of an amino group formed with inorganic acids such as hydrochloric acid, hydrobromic acid, phosphoric acid, sulfuric acid and perchloric acid or with organic acids such as acetic acid, maleic acid, tartaric acid, citric acid, succinic acid or malonic acid or by using other methods used in the art such as ion exchange. In some embodiments, pharmaceutically acceptable salts include, but are not limited to, adipate, alginate, ascorbate, aspartate, benzenesulfonate, benzoate, bisulfate, borate, butyrate, camphorate, camphorsulfonate, citrate, cyclopentanepropionate, digluconate, dodecylsulfate, ethanesulfonate, formate, fumarate, glucoheptonate, glycerophosphate, gluconate, hemisulfate, heptanoate, hexanoate, hydroiodide, 2-hydroxy-ethanesulfonate, lactobionate, lactate, laurate, lauryl sulfate, malate, maleate, malonate, methanesulfonate, 2-naphthalenesulfonate, nicotinate, nitrate, oleate, oxalate, palmitate, pamoate, pectinate, persulfate, 3-phenylpropionate, phosphate, picrate, pivalate, propionate, stearate, succinate, sulfate, tartrate, thiocyanate, p-toluenesulfonate, undecanoate, valerate salts, and the like. Representative alkali or alkaline earth metal salts include sodium, lithium, potassium, calcium, magnesium, and the like. In some embodiments, pharmaceutically acceptable salts include, when appropriate, nontoxic ammonium, quaternary ammonium, and amine cations formed using counterions such as halide, hydroxide, carboxylate, sulfate, phosphate, nitrate, alkyl having from 1 to 6 carbon atoms, sulfonate and aryl sulfonate.

[0407] Plasmid: The term “plasmid”, as used herein, refers to an extra-chromosomal (apart from a chromosome) length of DNA; plasmids are generally circular and generally capable of independent replication, though exceptions exist such as linear plasmids and plasmids which are not capable of independent replication (including, but not limited to, suicide vectors). In some embodiments, a plasmid can be extra-chromosomal under some conditions (e.g., in a laboratory), but capable of integrating into a chromosome (e.g., acting as a suicide vector capable of integrating into a chromosome in a cell or subject). Plasmids naturally exist in many organisms, including bacteria and some eukaryotic organisms, and are commonly engineered and produced artificially to carry genes into an organism. A plasmid is generally double-stranded, or can alternatively be single-stranded or partially single- and double-stranded, or have other strandedness. Artificial plasmids are commonly used in genetic engineering. Plasmids include plasmids encoding or capable of expressing a nucleic acid, including, without limitation, a mRNA, a RNAi agent or precursor thereof, an antagonist to another nucleic acid (including, without limitation, an antagonist to a miRNA, RNAi agent, mRNA, etc.) or precursor thereof, or other nucleic acids of therapeutic benefit. Additional parts of a plasmid can optionally include one or more copies of any one or more component selected from: a gene encoding a protein related to replication, an origin or replication, a gene encoding a replication initiator protein, an origin of replication enhancer, a gene encoding a nucleic acid of therapeutic benefit (or a precursor thereof), one or multiple promoters, one or multiple transcription enhancers, one or multiple transcription terminators, one or more marker genes (e.g., a gene encoding resistance to an antibiotic or encoding an enzyme required for survival and/or growth under certain laboratory conditions). In some embodiments, a plasmid is a suicide vector, which can lack any of: an origin of replication, a gene encoding a DNA replication initiator protein, or any other component required for independent replication. In some embodiments, two plasmids can be physically separate, but produce products which work in concert; for example, one plasmid can encode a gene for a transcriptional enhancer which enhances transcription of a gene encoded on another plasmid; for another example, one plasmid can comprise a gene encoding a DNA replication initiator protein which initiates replication at a DNA replication origin on another plasmid. Various plasmids are known in the art. In some embodiments, a composition comprises a lipid and a portion of a plasmid capable of mediating at least one function of a plasmid.

[0408] Protecting group: The term “protecting group,” as used herein, is well known in the art and includes those described in detail in Protecting Groups in Organic Synthesis, T. W. Greene and P. G. M. Wuts, 3^{rd} edition, John Wiley & Sons, 1999, the entirety of which is incorporated herein by reference. Also included are those protecting groups specially adapted for nucleoside and nucleotide chemistry described in Current Protocols in Nucleic Acid Chemistry, edited by Serge L. Beaucage et al. 06/2012, the entirety of Chapter 2 is incorporated herein by reference. Suitable amino-protecting groups include methyl carbamate, ethyl carbamante, 9-fluorenylmethyl carbamate (Fmoc), 9-(2-sulfo)fluorenylmethyl carbamate, 9-(2,7-dibromo)fluoroenylmethyl carbamate, 2,7-di-t-butyl-[9-(10,10-dioxo-10,10,10,10-tetrahydrothioxanthyl)]methyl carbamate (DBD-Tmoc), 4-methoxyphenacyl carbamate (Phenoc), 2,2,2-trichloroethyl carbamate (Troc), 2-trimethylsilylethyl carbamate (Teoc), 2-phenylethyl carbamate (hZ), 1-(1-adamantyl)-1-methylethyl carbamate (Adpoc), 1,1-dimethyl-2-haloethyl carbamate, 1,1-dimethyl-2,2-dibromoethyl carbamate (DB-t-BOC), 1,1-dimethyl-2,2,2-trichloroethyl carbamate (TCBOC), 1-methyl-1-(4-biphenylyl)ethyl carbamate (Bpoc), 1-(3,5-di-t-butylphenyl)-1-methylethyl carbamate (t-Bumeoc), 2-(2′- and 4′-pyridyl)ethyl carbamate (Pyoc), 2-(N,N-dicyclohexylcarboxamido)ethyl carbamate, t-butyl carbamate (BOC), 1-adamantyl carbamate (Adoc), vinyl carbamate (Voc), allyl carbamate (Alloc), 1-isopropylallyl carbamate (Ipaoc), cinnamyl carbamate (Coc), 4-nitrocinnamyl carbamate (Noc), 8-quinolyl carbamate, N-hydroxypiperidinyl carbamate, alkyldithio carbamate, benzyl carbamate (Cbz), p-methoxybenzyl carbamate (Moz), p-nitobenzyl carbamate, p-bromobenzyl carbamate, p-chlorobenzyl carbamate, 2,4-dichlorobenzyl carbamate, 4-methylsulfinylbenzyl carbamate (Msz), 9-anthrylmethyl carbamate, diphenylmethyl carbamate, 2-methylthioethyl carbamate, 2-methylsulfonylethyl carbamate, 2-(p-toluenesulfonyl)ethyl carbamate, [2-(1,3-dithianyl)]methyl carbamate (Dmoc), 4-methylthiophenyl carbamate (Mtpc), 2,4-dimethylthiophenyl carbamate (Bmpc), 2-phosphonioethyl carbamate (Peoc), 2-triphenylphosphonioisopropyl carbamate (Ppoc), 1,1-dimethyl-2-cyanoethyl carbamate, m-chloro-p-acyloxybenzyl carbamate, p-(dihydroxyboryl)benzyl carbamate, 5-benzisoxazolylmethyl carbamate, 2-(trifluoromethyl)-6-chromonylmethyl carbamate (Tcroc), m-nitrophenyl carbamate, 3,5-dimethoxybenzyl carbamate, o-nitrobenzyl carbamate, 3,4-dimethoxy-6-nitrobenzyl carbamate, phenyl(o-nitrophenyl)methyl carbamate, phenothiazinyl-(10)-carbonyl derivative, N′-p-toluenesulfonylaminocarbonyl derivative, N′-phenylaminothiocarbonyl derivative, t-amyl carbamate, S-benzyl thiocarbamate, p-cyanobenzyl carbamate, cyclobutyl carbamate, cyclohexyl carbamate, cyclopentyl carbamate, cyclopropylmethyl carbamate, p-decyloxybenzyl carbamate, 2,2-dimethoxycarbonylvinyl carbamate, o-(N,N-dimethylcarboxamido)benzyl carbamate, 1,1-dimethyl-3-(N,N-dimethylcarboxamido)propyl carbamate, 1,1-dimethylpropynyl carbamate, di(2-pyridyl)methyl carbamate, 2-furanylmethyl carbamate, 2-iodoethyl carbamate, isobornyl carbamate, isobutyl carbamate, isonicotinyl carbamate, p-(p′-methoxyphenylazo)benzyl carbamate, 1-methylcyclobutyl carbamate, 1-methylcyclohexyl carbamate, 1-methyl-1-cyclopropylmethyl carbamate, 1-methyl-1-(3,5-dimethoxyphenyl)ethyl carbamate, 1-methyl-1-(p-phenylazophenyl)ethyl carbamate, 1-methyl-1-phenylethyl carbamate, 1-methyl-1-(4-pyridyl)ethyl carbamate, phenyl carbamate, p-(phenylazo)benzyl carbamate, 2,4,6-tri-t-butylphenyl carbamate, 4-(trimethylammonium)benzyl carbamate, 2,4,6-trimethylbenzyl carbamate, formamide, acetamide, chloroacetamide, trichloroacetamide, trifluoroacetamide, phenylacetamide, 3-phenylpropanamide, picolinamide, 3-pyridylcarboxamide, N-benzoylphenylalanyl derivative, benzamide, p-phenylbenzamide, o-nitophenylacetamide, o-nitrophenoxyacetamide, acetoacetamide, (N′-dithiobenzyloxycarbonylamino)acetamide, 3-(p-hydroxyphenyl)propanamide, 3-(o-nitrophenyl)propanamide, 2-methyl-2-(o-nitrophenoxy)propanamide, 2-methyl-2-(o-phenylazophenoxy)propanamide, 4-chlorobutanamide, 3-methyl-3-nitrobutanamide, o-nitrocinnamide, N-acetylmethionine derivative, o-nitrobenzamide, o-(benzoyloxymethyl)benzamide, 4,5-diphenyl-3-oxazolin-2-one, N-phthalimide, N-dithiasuccinimide (Dts), N-2,3-diphenylmaleimide, N-2,5-dimethylpyrrole, N-1,1,4,4-tetramethyldisilylazacyclopentane adduct (STABASE), 5-substituted 1,3-dimethyl-1,3,5-triazacyclohexan-2-one, 5-substituted 1,3-dibenzyl-1,3,5-triazacyclohexan-2-one, 1-substituted 3,5-dinitro-4-pyridone, N-methylamine, N-allylamine, N-[2-(trimethylsilyl)ethoxy]methylamine (SEM), N-3-acetoxypropylamine, N-(1-isopropyl-4-nitro-2-oxo-3-pyroolin-3-yl)amine, quaternary ammonium salts, N-benzylamine, N-di(4-methoxyphenyl)methylamine, N—S-dibenzosuberylamine, N-triphenylmethylamine (Tr), N-[(4-methoxyphenyl)diphenylmethyl]amine (MMTr), N-9-phenylfluorenylamine (PhF), N-2,7-dichloro-9-fluorenylmethyleneamine, N-ferrocenylmethylamino (Fcm), N-2-picolylamino N′-oxide, N-1,1-dimethylthiomethyleneamine, N-benzylideneamine, N-p-methoxybenzylideneamine, N-diphenylmethyleneamine, N-[(2-pyridyl)mesityl]methyleneamine, N—(N′,N′-dimethylaminomethylene)amine, N,N′-isopropylidenediamine, N-p-nitrobenzylideneamine, N-salicylideneamine, N—S-chlorosalicylideneamine, N-(5-chloro-2-hydroxyphenyl)phenylmethyleneamine, N-cyclohexylideneamine, N-(5,5-dimethyl-3-oxo-1-cyclohexenyl)amine, N-borane derivative, N-diphenylborinic acid derivative, N-[phenyl(pentacarbonylchromium- or tungsten)carbonyl]amine, N-copper chelate, N-zinc chelate, N-nitroamine, N-nitrosoamine, amine N-oxide, diphenylphosphinamide (Dpp), dimethylthiophosphinamide (Mpt), diphenylthiophosphinamide (Ppt), dialkyl phosphoramidates, dibenzyl phosphoramidate, diphenyl phosphoramidate, benzenesulfenamide, o-nitrobenzenesulfenamide (Nps), 2,4-dinitrobenzenesulfenamide, pentachlorobenzenesulfenamide, 2-nitro-4-methoxybenzenesulfenamide, triphenylmethylsulfenamide, 3-nitropyridinesulfenamide (Npys), p-toluenesulfonamide (Ts), benzenesulfonamide, 2,3,6,-trimethyl-4-methoxybenzenesulfonamide (Mtr), 2,4,6-trimethoxybenzenesulfonamide (Mtb), 2,6-dimethyl-4-methoxybenzenesulfonamide (Pme), 2,3,5,6-tetramethyl-4-methoxybenzenesulfonamide (Mte), 4-methoxybenzenesulfonamide (Mbs), 2,4,6-trimethylbenzenesulfonamide (Mts), 2,6-dimethoxy-4-methylbenzenesulfonamide (iMds), 2,2,5,7,8-pentamethylchroman-6-sulfonamide (Pmc), methanesulfonamide (Ms), 0-trimethylsilylethanesulfonamide (SES), 9-anthracenesulfonamide, 4-(4′,8′-dimethoxynaphthylmethyl)benzenesulfonamide (DNMBS), benzylsulfonamide, trifluoromethylsulfonamide, and phenacylsulfonamide. Suitably protected carboxylic acids further include, but are not limited to, silyl-, alkyl-, alkenyl-, aryl-, and arylalkyl-protected carboxylic acids. Examples of suitable silyl groups include trimethylsilyl, triethylsilyl, t-butyldimethylsilyl, t-butyldiphenylsilyl, triisopropylsilyl, and the like. Examples of suitable alkyl groups include methyl, benzyl, p-methoxybenzyl, 3,4-dimethoxybenzyl, trityl, t-butyl, tetrahydropyran-2-yl. Examples of suitable alkenyl groups include allyl. Examples of suitable aryl groups include optionally substituted phenyl, biphenyl, or naphthyl. Examples of suitable arylalkyl groups include optionally substituted benzyl (e.g., p-methoxybenzyl (MPM), 3,4-dimethoxybenzyl, O-nitrobenzyl, p-nitrobenzyl, p-halobenzyl, 2,6-dichlorobenzyl, p-cyanobenzyl), and 2- and 4-picolyl. Suitable hydroxyl protecting groups include methyl, methoxylmethyl (MOM), methylthiomethyl (MTM), t-butylthiomethyl, (phenyldimethylsilyl)methoxymethyl (SMOM), benzyloxymethyl (BOM), p-methoxybenzyloxymethyl (PMBM), (4-methoxyphenoxy)methyl (p-AOM), guaiacolmethyl (GUM), t-butoxymethyl, 4-pentenyloxymethyl (POM), siloxymethyl, 2-methoxyethoxymethyl (MEM), 2,2,2-trichloroethoxymethyl, bis(2-chloroethoxy)methyl, 2-(trimethylsilyl)ethoxymethyl (SEMOR), tetrahydropyranyl (THP), 3-bromotetrahydropyranyl, tetrahydrothiopyranyl, 1-methoxycyclohexyl, 4-methoxytetrahydropyranyl (MTHP), 4-methoxytetrahydrothiopyranyl, 4-methoxytetrahydrothiopyranyl S,S-dioxide, 1-[(2-chloro-4-methyl)phenyl]-4-methoxypiperidin-4-yl (CTMP), 1,4-dioxan-2-yl, tetrahydrofuranyl, tetrahydrothiofuranyl, 2,3,3a,4,5,6,7,7a-octahydro-7,8,8-trimethyl-4,7-methanobenzofuran-2-yl, 1-ethoxyethyl, 1-(2-chloroethoxy)ethyl, 1-methyl-1-methoxyethyl, 1-methyl-1-benzyloxyethyl, 1-methyl-1-benzyloxy-2-fluoroethyl, 2,2,2-trichloroethyl, 2-trimethylsilylethyl, 2-(phenylselenyl)ethyl, t-butyl, allyl, p-chlorophenyl, p-methoxyphenyl, 2,4-dinitrophenyl, benzyl, p-methoxybenzyl, 3,4-dimethoxybenzyl, o-nitrobenzyl, p-nitrobenzyl, p-halobenzyl, 2,6-dichlorobenzyl, p-cyanobenzyl, p-phenylbenzyl, 2-picolyl, 4-picolyl, 3-methyl-2-picolyl N-oxido, diphenylmethyl, p,p′-dinitrobenzhydryl, 5-dibenzosuberyl, triphenylmethyl, a-naphthyldiphenylmethyl, p-methoxyphenyldiphenylmethyl, di(p-methoxyphenyl)phenylmethyl, tri(p-methoxyphenyl)methyl, 4-(4′-bromophenacyloxyphenyl)diphenylmethyl, 4,4′,4″-tris(4,5-dichlorophthalimidophenyl)methyl, 4,4′,4″-tris(levulinoyloxyphenyl)methyl, 4,4′,4″-tris(benzoyloxyphenyl)methyl, 3-(imidazol-1-yl)bis(4′,4″-dimethoxyphenyl)methyl, 1,1-bis(4-methoxyphenyl)-1′-pyrenylmethyl, 9-anthryl, 9-(9-phenyl)xanthenyl, 9-(9-phenyl-10-oxo)anthryl, 1,3-benzodithiolan-2-yl, benzisothiazolyl S,S-dioxido, trimethylsilyl (TMS), triethylsilyl (TES), triisopropylsilyl (TIPS), dimethylisopropylsilyl (IPDMS), diethylisopropylsilyl (DEIPS), dimethylthexylsilyl, t-butyldimethylsilyl (TBDMS), t-butyldiphenylsilyl (TBDPS), tribenzylsilyl, tri-p-xylylsilyl, triphenylsilyl, diphenylmethylsilyl (DPMS), t-butylmethoxyphenylsilyl (TBMPS), formate, benzoylformate, acetate, chloroacetate, dichloroacetate, trichloroacetate, trifluoroacetate, methoxyacetate, triphenylmethoxyacetate, phenoxyacetate, p-chlorophenoxyacetate, 3-phenylpropionate, 4-oxopentanoate (levulinate), 4,4-(ethylenedithio)pentanoate (levulinoyldithioacetal), pivaloate, adamantoate, crotonate, 4-methoxycrotonate, benzoate, p-phenylbenzoate, 2,4,6-trimethylbenzoate (mesitoate), alkyl methyl carbonate, 9-fluorenylmethyl carbonate (Fmoc), alkyl ethyl carbonate, alkyl 2,2,2-trichloroethyl carbonate (Troc), 2-(trimethylsilyl)ethyl carbonate (TMSEC), 2-(phenylsulfonyl) ethyl carbonate (Psec), 2-(triphenylphosphonio) ethyl carbonate (Peoc), alkyl isobutyl carbonate, alkyl vinyl carbonate alkyl allyl carbonate, alkyl p-nitrophenyl carbonate, alkyl benzyl carbonate, alkyl p-methoxybenzyl carbonate, alkyl 3,4-dimethoxybenzyl carbonate, alkyl o-nitrobenzyl carbonate, alkyl p-nitrobenzyl carbonate, alkyl S-benzyl thiocarbonate, 4-ethoxy-1-napththyl carbonate, methyl dithiocarbonate, 2-iodobenzoate, 4-azidobutyrate, 4-nitro-4-methylpentanoate, o-(dibromomethyl)benzoate, 2-formylbenzenesulfonate, 2-(methylthiomethoxy)ethyl, 4-(methylthiomethoxy)butyrate, 2-(methylthiomethoxymethyl)benzoate, 2,6-dichloro-4-methylphenoxyacetate, 2,6-dichloro-4-(1,1,3,3-tetramethylbutyl)phenoxyacetate, 2,4-bis(1,1-dimethylpropyl)phenoxyacetate, chlorodiphenylacetate, isobutyrate, monosuccinoate, (E)-2-methyl-2-butenoate, o-(methoxycarbonyl)benzoate, α-naphthoate, nitrate, alkyl N,N,N′,N′-tetramethylphosphorodiamidate, alkyl N-phenylcarbamate, borate, dimethylphosphinothioyl, alkyl 2,4-dinitrophenylsulfenate, sulfate, methanesulfonate (mesylate), benzylsulfonate, and tosylate (Ts). For protecting 1,2- or 1,3-diols, the protecting groups include methylene acetal, ethylidene acetal, 1-t-butylethylidene ketal, 1-phenylethylidene ketal, (4-methoxyphenyl)ethylidene acetal, 2,2,2-trichloroethylidene acetal, acetonide, cyclopentylidene ketal, cyclohexylidene ketal, cycloheptylidene ketal, benzylidene acetal, p-methoxybenzylidene acetal, 2,4-dimethoxybenzylidene ketal, 3,4-dimethoxybenzylidene acetal, 2-nitrobenzylidene acetal, methoxymethylene acetal, ethoxymethylene acetal, dimethoxymethylene ortho ester, 1-methoxyethylidene ortho ester, 1-ethoxyethylidine ortho ester, 1,2-dimethoxyethylidene ortho ester, a-methoxybenzylidene ortho ester, 1-(N,N-dimethylamino)ethylidene derivative, a-(N,N′-dimethylamino)benzylidene derivative, 2-oxacyclopentylidene ortho ester, di-t-butylsilylene group (DTBS), 1,3-(1,1,3,3-tetraisopropyldisiloxanylidene) derivative (TIPDS), tetra-t-butoxydisiloxane-1,3-diylidene derivative (TBDS), cyclic carbonates, cyclic boronates, ethyl boronate, and phenyl boronate. In some embodiments, a hydroxyl protecting group is acetyl, t-butyl, tbutoxymethyl, methoxymethyl, tetrahydropyranyl, 1-ethoxyethyl, 1-(2-chloroethoxy)ethyl, 2-trimethylsilylethyl, p-chlorophenyl, 2,4-dinitrophenyl, benzyl, benzoyl, p-phenylbenzoyl, 2,6-dichlorobenzyl, diphenylmethyl, p-nitrobenzyl, triphenylmethyl (trityl), 4,4′-dimethoxytrityl, trimethylsilyl, triethylsilyl, t-butyldimethylsilyl, t-butyldiphenylsilyl, triphenylsilyl, triisopropylsilyl, benzoylformate, chloroacetyl, trichloroacetyl, trifiuoroacetyl, pivaloyl, 9-fluorenylmethyl carbonate, mesylate, tosylate, triflate, trityl, monomethoxytrityl (MMTr), 4,4′-dimethoxytrityl, (DMTr) and 4,4′,4″-trimethoxytrityl (TMTr), 2-cyanoethyl (CE or Cne), 2-(trimethylsilyl)ethyl (TSE), 2-(2-nitrophenyl)ethyl, 2-(4-cyanophenyl)ethyl 2-(4-nitrophenyl)ethyl (NPE), 2-(4-nitrophenylsulfonyl)ethyl, 3,5-dichlorophenyl, 2,4-dimethylphenyl, 2-nitrophenyl, 4-nitrophenyl, 2,4,6-trimethylphenyl, 2-(2-nitrophenyl)ethyl, butylthiocarbonyl, 4,4′,4″-tris(benzoyloxy)trityl, diphenylcarbamoyl, levulinyl, 2-(dibromomethyl)benzoyl (Dbmb), 2-(isopropylthiomethoxymethyl)benzoyl (Ptmt), 9-phenylxanthen-9-yl (pixyl) or 9-(p-methoxyphenyl)xanthine-9-yl (MOX). In some embodiments, each of the hydroxyl protecting groups is, independently selected from acetyl, benzyl, t-butyldimethylsilyl, t-butyldiphenylsilyl and 4,4′-dimethoxytrityl. In some embodiments, the hydroxyl protecting group is selected from the group consisting of trityl, monomethoxytrityl and 4,4′-dimethoxytrityl group. In some embodiments, a phosphorous protecting group is a group attached to the internucleotide phosphorous linkage throughout oligonucleotide synthesis. In some embodiments, the phosphorous protecting group is attached to the sulfur atom of the internucleotide phosphorothioate linkage. In some embodiments, the phosphorous protecting group is attached to the oxygen atom of the internucleotide phosphorothioate linkage. In some embodiments, the phosphorous protecting group is attached to the oxygen atom of the internucleotide phosphate linkage. In some embodiments the phosphorous protecting group is 2-cyanoethyl (CE or Cne), 2-trimethylsilylethyl, 2-nitroethyl, 2-sulfonylethyl, methyl, benzyl, o-nitrobenzyl, 2-(p-nitrophenyl)ethyl (NPE or Npe), 2-phenylethyl, 3-(N-tert-butylcarboxamido)-1-propyl, 4-oxopentyl, 4-methylthio-1-butyl, 2-cyano-1,1-dimethylethyl, 4-N-methylaminobutyl, 3-(2-pyridyl)-1-propyl, 2-[N-methyl-N-(2-pyridyl)]aminoethyl, 2-(N-formyl,N-methyl)aminoethyl, 4-[N-methyl-N-(2,2,2-trifluoroacetyl)amino]butyl.

[0409] Protein: As used herein, the term “protein” refers to a polypeptide (i.e., a string of at least two amino acids linked to one another by peptide bonds). In some embodiments, proteins include only naturally-occurring amino acids. In some embodiments, proteins include one or more non-naturally-occurring amino acids (e.g., moieties that form one or more peptide bonds with adjacent amino acids). In some embodiments, one or more residues in a protein chain contain a non-amino-acid moiety (e.g., a glycan, etc.). In some embodiments, a protein includes more than one polypeptide chain, for example linked by one or more disulfide bonds or associated by other means. In some embodiments, proteins contain L-amino acids, D-amino acids, or both; in some embodiments, proteins contain one or more amino acid modifications or analogs known in the art. Useful modifications include, e.g., terminal acetylation, amidation, methylation, etc. The term “peptide” is generally used to refer to a polypeptide having a length of less than about 100 amino acids, less than about 50 amino acids, less than 20 amino acids, or less than 10 amino acids. In some embodiments, proteins are antibodies, antibody fragments, biologically active portions thereof, and/or characteristic portions thereof.

[0410] Ribozymes: The term “ribozyme”, as used herein, refers to a catalytic RNA that functions as an enzyme and does not require proteins for catalysis. In some embodiments, a ribozyme is a self-processing RNA that catalyzes RNA cleavage and ligation reactions. In some embodiments, a substrate recognition domain of a ribozyme is artificially engineered to stimulate site-specific cleavage in cis (the same nucleic acid strand) or trans (a non-covalently linked nucleic acid). Scherer et al. 2003 Nat Biotechnol. 21:1457-1465. In some embodiments, a ribozyme is subject to in vitro selection and directed evolution to generate improved properties and new functions for therapeutic and diagnostic reagents. In some embodiments, a ribozyme is engineered to be allosterically activated by effector molecules, which has led to the development of artificial “riboswitches” as biosensors and synthetic biological tools. Wieland et al. 2010 Chem Biol. 17:236-242; Liang et al. 2011 Mol Cell. 43:915-926. In some embodiments, a ribozyme is derived from a “hammerhead” or “hairpin/paperclip” motifs. In some embodiments, a ribozyme is delivered to the target cells in RNA form or can be transcribed from therapeutic genes. In some embodiments, a ribozyme is chemically modified with any one or more of the following modifications: 5′-PS backbone linkage, 2′-O-Me, 2′-deoxy-2′-C-allyl uridine, and terminal inverted 3′-3′ deoxyabasic nucleotides. A non-limiting example of a ribozyme is Angiozyme (RPI.4610), which targets the mRNA of the vascular endothelial growth factor receptor-1 (VEGFR-1) to block angiogenesis and tumor growth. Kobayashi et al. 2005 Cancer Chemother Pharmacol. 56:329-336; Weng et al. 2005 Mol Cancer Ther. 4:948-955. Another non-limiting example of a ribozyme is Heptazyme, a synthetic ribozyme against hepatitis C virus (HCV). Sandberg et al. 2001 Hepatology 34:333a-333a; Tong et al. 2002 Hepatology 36:360a-360a; Berk 2006 Hepatology 43:S13-S30. In some embodiments, Ribozymes include those that target any of: VEGFR-1, HCV IRES, HIV U5 and pol, HIV Tat and Vpr, CCR5, HIV Tat and Rev. In some embodiments, a composition comprises a lipid and a portion of a ribozyme capable of mediating at least one function of a ribozyme.

[0411] RNAi agent: The term “RNAi agent”, as used herein, refers to a molecule capable of mediating RNA interference. The term encompasses a variety of structures and formats, including, as a non-limiting example, siRNAs (including but not limited to those of the “canonical” structure), in addition to various natural and artificial structures capable of mediating RNA interference. The term “RNA interference” or “RNAi”, as used herein, refers to a post-transcriptional, targeted gene-silencing technique mediated by the RISC (RNA interference silencing complex) that uses a RNAi agent to degrade messenger RNA (mRNA) containing a sequence which is the same as or very similar to the RNAi agent. See: Zamore and Haley, 2005, Science, 309, 1519-1524; Zamore et al., 2000, Cell, 101, 25-33; Elbashir et al., 2001, Nature, 41 1, 494-498; and Kreutzer et al., PCT Publication WO 00/44895; Fire, PCT Publication WO 99/32619; Mello and Fire, PCT Publication WO 01/29058; and the like. The process of RNAi occurs naturally when long dsRNA is introduced into a cell and cleaved by ribonuclease III (Dicer) into shorter fragments called siRNAs. Naturally produced siRNAs are typically about 21 nucleotides long and comprise about 19 base pair duplexes with two 2-nt overhangs (the “canonical” structure). One strand of the siRNA is reportedly incorporated into the RNA-induced silencing complex (RISC). This strand (known as the anti-sense or guide strand strand) guides RISC to a complementary mRNA. One or more nucleases in the RISC then reportedly mediates cleavage of the target mRNA to induce silencing. Cleavage of the target RNA reportedly takes place in the middle of the region complementary to the anti-sense strand. See: Nykanen, et al. 2001 Cell 107:309; Sharp et al. 2001 Genes Dev. 15:485; Bernstein, et al. 2001 Nature 409:363; Elbashir, et al. 2001 Genes Dev. 15:188. As various non-limiting examples, a RNAi agent includes: siRNAs (including but not limited to those of the canonical structure), shRNAs, miRNAs, sisiRNAs, meroduplex RNAs (mdRNAs), DNA-RNA chimeras, siRNAs comprising two mismatches (or more mismatches), neutral siRNAs, aiRNAs, or a siRNA comprising a terminal or internal spacer (e.g., an 18-mer format siRNA). In various non-limiting examples, the RNAi agent is a shRNA (small hairpin RNA or short hairpin RNA), which reportedly comprises a sequence of RNA that makes a tight hairpin turn and, like siRNAs, silences targets via RISC. The antisense and sense strand are thus reportedly connected by a hairpin. shRNAs reportedly can be expressed, for example, via delivery of plasmids or through viral or bacterial vectors. Various varieties of shRNAs have been reported in the art. See, for example: Xiang et al. 2006. Nature Biotech. 24: 697-702; Macrae et al. 2006 Science 31 1: 195-8. Lombardo et al. 2007. Nature Biotech. 25: 1298-1306; Wang et al. 201 1. Pharm. Res. 28: 2983-2995; Senzer et al. 2011 Mol. Ther. 20: 679-686. In various non-limiting examples, the RNAi agent is a miRNA (microRNA), which reportedly is a small RNA molecule (ca. 22 nt) that, like siRNAs, also silences targets via RISC. Naturally-occurring miRNAs are encoded by eukaryotic nuclear DNA; miRNAs are generated by post-transcriptional RNA processing, and function via base-pairing with complementary sequences within mRNA molecules, usually resulting in translational repression or target degradation and gene silencing. The human genome can reportedly encode over 1000 miRNAs, which can target about 60% of mammalian genes and are abundant in many human cell types. Various varieties of naturally-occurring and artificial derivatives of miRNAs have been reported in the art. See, for example: Lewis et al. 2003. Cell 1 15: 787-798; Lim et al. 2003. Genes Dev. 17: 991-1008; He et al. 2004. Nat. Rev. Genet. 5: 522-31; Bentwich et al. 2005. Nat. Genet. 37: 766-70; Lewis et al. 2005. Cell 120: 15-20; Kusenda et al. 2006. Biomed Pap Med Fac Univ Palacky Olomouc Czech Repub 150: 205-15; Zhang et al. 2006. J. Gen. Gen. 36: 1-6; Brodersen et al. 2008. Science 320: 1 185-90; Friedman et al. 2009. Genome Res. 19 (1): 92-105; Bartel 2009. Cell 136 (2): 215-33. In various non-limiting examples, the RNAi agent is a sisiRNA (small internally segmented interfering RNA), wherein the sense strand comprises at least one single-stranded nick. This nick decreases the incorporation of the sense strand into the RISC complex and thus reduces off-target effects. See: WO 2007/107162. In various non-limiting examples, a DNA-RNA chimera, wherein the seed portion of each strand is DNA, while the remainder of each strand is RNA. See: Yamato et al. 2011 Cancer Gene Ther. 18: 587-597. In various non-limiting examples, the RNAi agent is a siRNA comprising two mismatches, wherein that the molecule reportedly comprises three short double-stranded regions. In one embodiment of this RNAi agent, the guide (antisense) strand is a 22-mer, while the sense strand is a 20-mer (producing only a single 2-nt overhang on the 3′ end of the anti-sense strand; and two mismatches reportedly produce double-stranded regions of 6, 8 and 4 bp. See: U.S. Pat. App. 2009/0209626. In various embodiments, the RNAi agent is a neutral siRNA, in which the negative charges of the phosphate backbone are reversibly masked; Meade et al. 2014 Nat. Biotech. 32: 1256-1261. In various non-limiting examples, the RNAi agent is a aiRNA (asymmetrical interfering RNA) which comprises a sense strand is shorter than 19-nt long, so that the anti-sense strand is reportedly preferentially loaded into RISC, and thus off-target effects are reduced. In various embodiments of this RNAi agent, the anti-sense strand is 21-nt long, but the sense strand is only 15 or 16 nt long. See: Sun et al. 2008 Nature Biotech. 26: 1379-1382; and Chu and Rana. 2008 RNA 14: 1714-1719. In various non-limiting examples, the RNAi agent is a siRNA comprising a terminal or internal spacer (e.g., an 18-mer format siRNA), which reportedly comprises a strand which is shorter than that of a canonical siRNA, wherein the strand comprises an internal or terminal spacer such as a ribitol or other type of non-nucleotide spacer. See: WO2015/051366. In some embodiments, RNAi agents include those that target any of: miR-122, VEGF, VEGF-R1, RTP801, Caspase 2, KRT6A(N171K), ADRB2, TRPV1, Syk kinase, RSV Nucleocapsid, Beta catenin, KRASG12D, Apo B, PLK1, KSP and VEGF, TTR, Bcr-Abl, PKN3, P53, RRM2, Furin and GM-CSF, LMP2, LMP7, MECL1, HIV Tat and Rev. In some embodiments, a composition comprises a lipid and a portion of a RNAi agent capable of mediating at least one function of a RNAi agent.

[0412] Small molecule: The terms “small molecule” or “low molecular weight molecule” or “LMW molecule” and the like, as used herein, refer to molecules which have a relatively low molecular weight. As a non-limiting example, small molecules include molecules that are less than about 7500, 7000, 6000, 5000, 4000, 3000, 2500, 2000, 1500, 1000, 900, 800, 700, 600, 500, 400, 300, 200, or 100 molecular weight. In some embodiments, a small molecule is a biologically active agent, and inhibits or decreases target gene or target gene product level, product, and/or activity. Example small molecules include, but are not limited to, small organic molecules (e.g., Cane et al. 1998. Science 282: 63), and natural product extract libraries. In another embodiment, small molecules are small, organic non-peptidic compounds. In some embodiments, small molecule inhibitors indirectly or directly inhibit or decrease target gene or target gene product level, product, and/or activity. In some embodiments, a composition comprises a lipid and a portion of a small molecule capable of mediating at least one function of a small molecule.

[0413] Small nucleolar RNAs (snoRNAs): The terms “small nucleolar RNA”, “snoRNA” and the like, as used herein, refer to any of a class of small RNA molecules that, for example, guide chemical modifications of other RNAs. In some embodiments, snoRNAs are capable of guiding chemical modifications of other RNAs, including ribosomal RNAs, transfer RNAs and small nuclear RNAs. In some embodiments, there are reportedly two main classes of snoRNA, the C/D box snoRNAs, which are associated with methylation, and the H/ACA box snoRNAs, which are associated with pseudouridylation.

[0414] Splice switching oligonucleotide (SSO): The term “Splice switching oligonucleotide” or “SSO”, as used herein, refers to an oligonucleotide capable of altering the splicing of a pre-mRNA. In a non-limiting example, a SSO can bind to a 5′ or 3′ splicing junction or to exonic splicing enhancer or silencing sites. In doing so, a SSO can modify splicing in various ways, such as promoting alternative use of exons, exon exclusion, or exon inclusion. In various embodiments, a SSO can cause an exon to be skipped; or, in other cases, prevent the skipping of an exon. Crooke 2004 Curr. Mol. Med. 4: 465-487; Bennett et al. 2010 Ann. Rev. Pharmacol. Toxicol. 50: 259-293; and Kole et al. 2012 Nat. Rev. Drug Discov. 11: 125-140. A non-limiting example of a SSO is an oligonucleotide which is reportedly capable of mediating skipping of an exon in dystrophin pre-mRNA. A non-limiting example of a SSO is WV-942. A non-limiting example of a SSO is an oligonucleotide which is capable of preventing the skipping of an exon in the SMN2 pre-mRNA; see Rigo et al. 2012 J. Cell Biol. 199: 21-25; and Kaczmarek et al. 2015 Exp. Opin. Exp. Drugs 24: 867-881. In some embodiments, a SSO switches splicing in a gene related to a muscle-related disorder. In some embodiments, a SSO is capable of skipping or mediating the skipping of an exon, wherein a mutation in the exon is related to a muscle-related disorder. In some embodiments, a SSO is capable of preventing the skipping or mediating the prevent of skipping of an exon, wherein a mutation in the exon is related to a muscle-related disorder. In some embodiments, a SSO is capable of skipping or mediates skipping of an exon in the dystrophin gene. In some embodiments, a SSO is capable of skipping or mediates skipping of exon 51, 45, 53 or 44 in the dystrophin gene. In some embodiments, a SSO is capable of preventing or mediating the prevention of skipping of an exon in a gene related to SMA. In some embodiments, a SSO is capable of preventing or mediating the prevention of skipping of an exon in the SMN₂ gene. In some embodiments, a SSO is capable of preventing or mediating the prevention of skipping of exon 7 in the SMN₂ gene.

[0415] Stereochemically isomeric forms, stereoforms, stereoisomers: The phrases “stereochemically isomeric forms”, “stereoforms”, “stereoisoforms”, “stereoisomers”, and the like, as used herein, refers to different compounds made up of the same atoms bonded by the same sequence of bonds but having different three-dimensional structures which are not interchangeable. In some embodiments of the disclosure, provided chemical compositions can be or include pure preparations of individual stereochemically isomeric forms of a compound; in some embodiments, provided chemical compositions can be or include mixtures of two or more stereochemically isomeric forms of the compound. In certain embodiments, such mixtures contain equal amounts of different stereochemically isomeric forms; in certain embodiments, such mixtures contain different amounts of at least two different stereochemically isomeric forms. In some embodiments, a chemical composition can contain all diastereomers and/or enantiomers of the compound. In some embodiments, a chemical composition can contain less than all diastereomers and/or enantiomers of a compound. In some embodiments, if a particular enantiomer of a compound of the present disclosure is desired, it can be prepared, for example, by asymmetric synthesis, or by derivation with a chiral auxiliary, where the resulting diastereomeric mixture is separated and the auxiliary group cleaved to provide the pure desired enantiomers. Alternatively, where the molecule contains a basic functional group, such as amino, diastereomeric salts are formed with an appropriate optically-active acid, and resolved, for example, by fractional crystallization. In some embodiments, a composition which is stereorandom comprises two or more stereoisomers.

[0416] Subject: As used herein, the term “subject” or “test subject” refers to any organism to which a provided compound or composition is administered in accordance with the present disclosure e.g., for experimental, diagnostic, prophylactic, and/or therapeutic purposes. Typical subjects include animals (e.g., mammals such as mice, rats, rabbits, non-human primates, and humans; insects; worms; etc.) and plants. In some embodiments, a subject can be suffering from, and/or susceptible to a disease, disorder, and/or condition.

[0417] Substantially: As used herein, the term “substantially” refers to the qualitative condition of exhibiting total or near-total extent or degree of a characteristic or property of interest. One of ordinary skill in the biological arts will understand that biological and chemical phenomena rarely, if ever, go to completion and/or proceed to completeness or achieve or avoid an absolute result. The term “substantially” is therefore used herein to capture the potential lack of completeness inherent in many biological and/or chemical phenomena.

[0418] Suffering from: An individual who is “suffering from” a disease, disorder, and/or condition has been diagnosed with and/or displays one or more symptoms of a disease, disorder, and/or condition.

[0419] Susceptible to: An individual who is “susceptible to” a disease, disorder, and/or condition is one who has a higher risk of developing the disease, disorder, and/or condition than does a member of the general public. In some embodiments, an individual who is susceptible to a disease, disorder and/or condition can not have been diagnosed with the disease, disorder, and/or condition. In some embodiments, an individual who is susceptible to a disease, disorder, and/or condition can exhibit symptoms of the disease, disorder, and/or condition. In some embodiments, an individual who is susceptible to a disease, disorder, and/or condition can not exhibit symptoms of the disease, disorder, and/or condition. In some embodiments, an individual who is susceptible to a disease, disorder, and/or condition will develop the disease, disorder, and/or condition. In some embodiments, an individual who is susceptible to a disease, disorder, and/or condition will not develop the disease, disorder, and/or condition.

[0420] Systemic: The phrases “systemic administration,” “administered systemically,” “peripheral administration,” and “administered peripherally” as used herein have their art-understood meaning referring to administration of a compound or composition such that it enters the recipient's system.

[0421] Targeting compound or moiety or component: The term “targeting moiety”, “targeting compound or moiety”, “targeting compound”, “target component”, and the like, as used herein, is a structure capable of targeting a compound or composition to a particular cell or tissue or subset of cells or tissues. In some embodiments, a targeting moiety is designed to take advantage of cell- or tissue-specific expression of particular targets, receptors, proteins, or other subcellular components; In some embodiments, a targeting moiety is a ligand (e.g., a small molecule, antibody, peptide, protein, carbohydrate, aptamer, etc.) that targets a compound or a composition to a cell or tissue, and/or binds to a target, receptor, protein, or other subcellular component. In some embodiments, a targeting moiety targets a composition comprising a lipid and a nucleic acid (including, but not limited to a CpG oligonucleotide) to a muscle cell or tissue. In some embodiments, a targeting moiety comprises a compound that targets a muscle cell or tissue. In some embodiments, a targeting moiety comprises fetuin, epidermal growth factor, fibroblast growth factor, insulin, and/or dexamethasone, or a component or fragment or combination thereof. In some embodiments, a targeting moiety targets a composition comprising a lipid and a nucleic acid (including, but not limited to a CpG oligonucleotide) to a neuron or other cell or tissue in the neuromuscular system. In some embodiments, a targeting moiety comprises a rabies virus peptide (see Kumar et al. 2007 Nature 448: 39-43; and Hwang do et al. 2011 Biomaterials 32: 4968-4975). In some embodiments, a targeting moiety is a moiety capable of binding to a neurotransmitter transporter, a dopamine transporter, a serotonin transporter, or norepinephrine transporter, or alpha-synuclein, or a mRNA encoding any of these components (see U.S. Pat. No. 9,084,825). In some embodiments, a targeting moiety is a transferrin receptor ligand or alpha-transferrin antibody, thus reportedly making use of a transferrin receptor-mediated route across the vascular endothelium. Clark et al. 2015 Proc. Natl. Acad. Sci. USA 112: 12486-12491; Bien-Ly et al. 2014 J. Exp. Med. 211: 233-244; and Youn et al. 2014 Mol. Pharm. 11: 486-495. In some embodiments, a targeting moiety binds to an integrin. In some embodiments, a targeting moiety binds to alphallbeta3, e.g., on platelets. In some embodiments, a targeting moiety binds to a beta2 integrin, e.g., on a leukocyte. In some embodiments, a targeting moiety binds to an alphavbeta3, e.g., on a tumor cell. In some embodiments, a targeting moiety binds to a GPCR (G protein-coupled receptor) (see Hanyaloglu et al. 2008 Ann. Rev. Pharm. Tox. 48: 537-568). In some embodiments, a targeting moiety binds to a gastrin releasing peptide receptor, e.g., on a cancer cell (see Cornelio et al. 2007 Ann. Oncol. 18: 1457-1466). In some embodiments, a targeting moiety comprises a carbonic anhydrase inhibitor.

[0422] Tautomeric forms: The phrase “tautomeric forms,” as used herein, is used to describe different isomeric forms of organic compounds that are capable of facile interconversion. Tautomers may be characterized by the formal migration of a hydrogen atom or proton, accompanied by a switch of a single bond and adjacent double bond. In some embodiments, tautomers may result from prototropic tautomerism (i.e., the relocation of a proton). In some embodiments, tautomers may result from valence tautomerism (i.e., the rapid reorganization of bonding electrons). All such tautomeric forms are intended to be included within the scope of the present disclosure. In some embodiments, tautomeric forms of a compound exist in mobile equilibrium with each other, so that attempts to prepare the separate substances results in the formation of a mixture. In some embodiments, tautomeric forms of a compound are separable and isolatable compounds. In some embodiments of the invention, chemical compositions may be provided that are or include pure preparations of a single tautomeric form of a compound. In some embodiments of the invention, chemical compositions may be provided as mixtures of two or more tautomeric forms of a compound. In certain embodiments, such mixtures contain equal amounts of different tautomeric forms; in certain embodiments, such mixtures contain different amounts of at least two different tautomeric forms of a compound. In some embodiments of the invention, chemical compositions may contain all tautomeric forms of a compound. In some embodiments of the invention, chemical compositions may contain less than all tautomeric forms of a compound. In some embodiments of the invention, chemical compositions may contain one or more tautomeric forms of a compound in amounts that vary over time as a result of interconversion. In some embodiments of the invention, the tautomerism is keto-enol tautomerism. One of skill in the chemical arts would recognize that a keto-enol tautomer can be “trapped” (i.e., chemically modified such that it remains in the “enol” form) using any suitable reagent known in the chemical arts to provide an enol derivative that may subsequently be isolated using one or more suitable techniques known in the art. Unless otherwise indicated, the present disclosure encompasses all tautomeric forms of relevant compounds, whether in pure form or in admixture with one another.

[0423] Therapeutic agent: As used herein, the phrase “therapeutic agent” refers to any agent that, when administered to a subject, has a therapeutic effect and/or elicits a desired biological and/or pharmacological effect. In some embodiments, a therapeutic agent is any substance that can be used to alleviate, ameliorate, relieve, inhibit, prevent, delay onset of, reduce severity of, and/or reduce incidence of one or more symptoms or features of a disease, disorder, and/or condition.

[0424] Therapeutically effective amount: As used herein, the term “therapeutically effective amount” means an amount of a substance (e.g., a therapeutic agent, composition, and/or formulation) that elicits a desired biological response when administered as part of a therapeutic regimen. In some embodiments, a therapeutically effective amount of a substance is an amount that is sufficient, when administered to a subject suffering from or susceptible to a disease, disorder, and/or condition, to treat, diagnose, prevent, and/or delay the onset of the disease, disorder, and/or condition. As will be appreciated by those of ordinary skill in this art, the effective amount of a substance can vary depending on such factors as the desired biological endpoint, the substance to be delivered, the target cell or tissue, etc. For example, the effective amount of compound in a formulation to treat a disease, disorder, and/or condition is the amount that alleviates, ameliorates, relieves, inhibits, prevents, delays onset of, reduces severity of and/or reduces incidence of one or more symptoms or features of the disease, disorder, and/or condition. In some embodiments, a therapeutically effective amount is administered in a single dose; in some embodiments, multiple unit doses are required to deliver a therapeutically effective amount.

[0425] Treat: As used herein, the term “treat,” “treatment,” or “treating” refers to any method used to partially or completely alleviate, ameliorate, relieve, inhibit, prevent, delay onset of, reduce severity of, and/or reduce incidence of one or more symptoms or features of a disease, disorder, and/or condition. Treatment can be administered to a subject who does not exhibit signs of a disease, disorder, and/or condition. In some embodiments, treatment can be administered to a subject who exhibits only early signs of the disease, disorder, and/or condition, for example for the purpose of decreasing the risk of developing pathology associated with the disease, disorder, and/or condition.

[0426] Unsaturated: The term “unsaturated” as used herein, means that a moiety has one or more units of unsaturation.

[0427] Unit dose: The expression “unit dose” as used herein refers to an amount administered as a single dose and/or in a physically discrete unit of a pharmaceutical composition. In many embodiments, a unit dose contains a predetermined quantity of an active agent. In some embodiments, a unit dose contains an entire single dose of the agent. In some embodiments, more than one unit dose is administered to achieve a total single dose. In some embodiments, administration of multiple unit doses is required, or expected to be required, in order to achieve an intended effect. A unit dose can be, for example, a volume of liquid (e.g., an acceptable carrier) containing a predetermined quantity of one or more therapeutic agents, a predetermined amount of one or more therapeutic agents in solid form, a sustained release formulation or drug delivery device containing a predetermined amount of one or more therapeutic agents, etc. It will be appreciated that a unit dose can be present in a formulation that includes any of a variety of components in addition to the therapeutic agent(s). For example, acceptable carriers (e.g., pharmaceutically acceptable carriers), diluents, stabilizers, buffers, preservatives, etc., can be included as described infra. The carrier can be a solvent such as water or alcohol. The carrier can optionally comprise any one or more of: excipients, diluents, fillers, salts, buffers, stabilizers, solubilizers, lipids or other substance which is well reported for medicine compositions in the art. This oligonucleotide can be administrated to a subject directly or with a nucleic acid delivery complex. A nucleic acid delivery complex can be, as a non-limiting example, a nucleic acid which is associated (e.g., ionic bond or covalent bond, or encapsulated in the way) with a targeting moiety (e.g., a molecule which generates high affinity bond to target cells (e.g., surface of B cell) and/or increase cellular uptake by target cells). Non-limiting examples of the nucleic acid delivery complex include nucleic acid associated with sterols such as cholesterol, lipids (e.g., cationic lipids, virosomes or liposomes) or target cell specific bonding factors (egg, ligands recognized by target cell specific receptor). Preferred complex can be enough stable in vivo to prevent from significant de-coupling before the internalization by the target cell. But the complex can be cleavage under appropriate conditions in the cells so that the nucleic acid is released in a functional form.

[0428] Vaccine: The term “vaccine”, as used herein, refers to a molecule that improves immunity to a particular disease or infectious agent. Vaccines encoded in the polynucleotides, primary constructs or mmRNA of the disclosure can be utilized to treat conditions or diseases in many therapeutic areas such as, but not limited to, cardiovascular, CNS, dermatology, endocrinology, oncology, immunology, respiratory, and anti-infective. In some embodiments, a vaccine comprises an agent that immunologically resembles a disease-causing micro-organism or fragment thereof; In some embodiments, a vaccine is made from weakened or killed forms of the virus, microbe, parasite or other pathogen, or a fragment thereof. In some embodiments, a vaccine stimulates the body's immune system to recognize the agent as a threat, destroy it, and keep a record of it, so that the immune system can more easily recognize and destroy any of these microorganisms that it later encounters. In some embodiments, a vaccine is prophylactic or therapeutic. In various embodiments, a vaccine can be to a virus, a bacterium, a parasite, or another pathogen. In some embodiments, a vaccine is to a virus selected from: common cold virus, Hepatitis A virus, Hepatitis B virus, Hepatitis E virus, Human papillomavirus, Influenza virus, Japanese encephalitis virus, Measles virus, Mumps virus, Polio virus, Rabies virus, Rhinovirus, Rotavirus, Rubella virus, Varicella zoster virus, Variola virus, and Yellow fever virus. In various embodiments, a vaccine is a vaccine selected from: a virus vaccine, Adenovirus vaccine, Coxsackie B virus vaccine, Cytomegalovirus vaccine, Dengue vaccine for humans, Eastern Equine encephalitis virus vaccine for humans, Ebola vaccine, Enterovirus 71 vaccine, Epstein-Barr vaccine, Hepatitis C vaccine, HIV vaccine, HTLV-1 T-lymphotropic leukemia vaccine for humans, Marburg virus disease vaccine, Norovirus vaccine, Respiratory syncytial virus vaccine for humans, Severe acute respiratory syndrome (SARS) vaccine, West Nile virus vaccine for humans, and Zika virus vaccine. In some embodiments, a vaccine is to a bacterium selected from: Bacillus anthracis, Vibrio cholerae, Bordetella pertussis, Clostridium tetani, Corynebacterium diphtheriae, Haemophilus influenzae type B (Hib), Neisseria meningitidis, Streptococcus pneumoniae, Coxiella burnetii, Mycobacterium tuberculosis, and Salmonella typhi. In various embodiments, a vaccine is a vaccine selected from: a Bacterial disease vaccine, Caries vaccine, Ehrlichiosis vaccine, Leprosy vaccine, Lyme disease vaccine, Staphylococcus aureus vaccine, Streptococcus pyogenes vaccine, Syphilis vaccine, Tularemia vaccine, and Yersinia pestis vaccine. In various embodiments, a vaccine is a vaccine selected from: A parasitic disease vaccine, Malaria vaccine, Schistosomiasis vaccine, Chagas disease vaccine, Hookworm vaccine, Onchocerciasis river blindness vaccine for humans, Trypanosomiasis vaccine, and Visceral leishmaniasis vaccine. In various embodiments, a vaccine is selected from: a non-infectious disease vaccine, Alzheimer's disease amyloid protein vaccine, Breast cancer vaccine, Ovarian cancer vaccine, Prostate cancer vaccine, and Talimogene laherparepvec (T-VEC). In some embodiments, a composition comprises a lipid and a portion of a vaccine capable of mediating at least one function of a vaccine.

[0429] Wild-type: As used herein, the term “wild-type” has its art-understood meaning that refers to an entity having a structure and/or activity as found in nature in a “normal” (as contrasted with mutant, diseased, altered, etc.) state or context. Those of ordinary skill in the art will appreciate that wild type genes and polypeptides often exist in multiple different forms (e.g., alleles).

[0430] The methods and structures described herein relating to compounds and compositions of the disclosure also apply to the pharmaceutically acceptable acid or base addition salts and all stereoisomeric forms of these compounds and compositions.

[0431] In general, properties of CpG oligonucleotides, including the ability to agonize or antagonize an immune response, can be assayed using any method or technique described herein or known in the art.

### Certain Embodiments

[0432] In some embodiments, the present disclosure pertains to the recognition that an immune response mediated by a CpG oligonucleotide can be affected by stereochemistry of chiral internucleotidic linkages, such as phosphorothioates, in a CpG region motif in the oligonucleotide.

[0433] In some embodiments, the present disclosure encompasses an insight that immune responses mediated by CpG oligonucleotides can be affected by stereochemistry. In some embodiments, the present disclosure presents data showing that stereorandom and stereopure CpG oligonucleotide compositions can display different immunomodulatory activities. Different stereopure CpG oligonucleotide compositions can also display different immunomodulatory activities.

[0434] According to some embodiments of the disclosure, when oligonucleotides comprising a CpG region motif have one or more chiral centers (e.g., within the CpG region motif), different stereoforms of such oligonucleotides can have different characteristics and/or activities, one or more of which can impact their utility and/or effectiveness. In some embodiments, chiral centers that can impact oligonucleotide characteristics and/or activities are found in internucleotidic linkages, e.g., involving one or more phosphorothioate or otherwise modified phosphodiester linkages.

[0435] In some embodiments, the present disclosure pertains to a chirally controlled CpG oligonucleotide composition, which is chirally controlled in that the composition comprises a predetermined level of oligonucleotides of an individual oligonucleotide type, wherein an oligonucleotide type is defined by: 1) base sequence; 2) pattern of backbone (internucleotidic) linkages; 3) pattern of backbone (internucleotidic linkage) chiral centers; and 4) pattern of backbone (internucleotidic linkage) phosphorus modifications; wherein each oligonucleotide of the individual oligonucleotide type independently comprises at least one common CpG region motif. In some embodiments, provided oligonucleotides of an individual oligonucleotide type further comprise one or more chemical modifications of one or more bases and/or sugars. In some embodiments, provided oligonucleotides comprise one or more modified sugars. In some embodiments, provided oligonucleotides comprise one or more 2′-modified sugars. In some embodiments, a 2′-modification is 2′-OR, wherein R is optionally substituted C₁₋₆ aliphatic. In some embodiments, provided oligonucleotides comprise one or more modified bases. In some embodiments, provided oligonucleotides comprise one or more modified 5mC. In some embodiments, provided oligonucleotides comprise one or more modified sugars and one or more modified bases.

[0436] In some embodiments, while the present disclosure provides data showing that, in at least some chirally controlled CpG oligonucleotide compositions, some CpG region motifs had greater immunomodulatory activity (e.g., greater agonistic or greater antagonistic activity) than others, the present disclosure encompasses any chirally controlled CpG oligonucleotide composition, wherein the CpG region motif comprises a stereodefined phosphorothioate or other internucleotidic linkage, wherein the CpG oligonucleotide demonstrates a greater agonistic or antagonistic activity than a negative control (e.g., in the absence of the oligonucleotide composition) or a reference composition (e.g., a stereorandom composition of oligonucleotides having the same base sequence and/or chemical modifications, another chirally controlled oligonucleotide composition of oligonucleotides having the same base sequence and/or chemical modifications, etc.). In some embodiments, the present disclosure provides a chirally controlled oligonucleotide composition comprising any CpG region motif disclosed herein.

[0437] In some embodiments, the present disclosure pertains to a chirally controlled CpG oligonucleotide composition, which is chirally controlled in that the composition comprises a predetermined level of oligonucleotides of an individual oligonucleotide type, wherein an oligonucleotide type is defined by: 1) base sequence; 2) pattern of backbone (internucleotidic) linkages; 3) pattern of backbone (internucleotidic linkage) chiral centers; and 4) pattern of backbone (internucleotidic linkage) phosphorus modifications; wherein each oligonucleotide of the individual oligonucleotide type independently comprises at least one common CpG region motif, which is any CpG region motif disclosed herein.

[0438] In some embodiments, the present disclosure pertains to a chirally controlled CpG oligonucleotide composition, which is chirally controlled in that the composition comprises a predetermined level of oligonucleotides of an individual oligonucleotide type, wherein an oligonucleotide type is defined by: 1) base sequence; 2) pattern of backbone (internucleotidic) linkages; 3) pattern of backbone (internucleotidic linkage) chiral centers; and 4) pattern of backbone (internucleotidic linkage) phosphorus modifications; wherein each oligonucleotide of the individual oligonucleotide type independently comprises at least one common CpG region motif: N₁-(*R/S)-C-(*R/S)-G-(*R/S)-N₂; wherein each (*R/S) is independently a chiral internucleotidic linkage, and N₁ and N₂ are any nucleoside. In some embodiments, the present disclosure pertains to a chirally controlled CpG oligonucleotide composition comprising a plurality of oligonucleotides, each of which: (a) hybridizes with a particular target sequence; (b) has a base sequence that includes at least one C residue in a CpG region motif that is present in all oligonucleotides of the plurality (a “common C residue”) and that has a 5-methyl group, a modified sugar moiety, or both; and (c) includes one or more chiral internucleotidic linkages, so that each oligonucleotide is a particular stereoform, characterized by its stereoidentity at each of the one or more chiral internucleotidic linkages, wherein stereoidentity identifies which stereoisomer is present at a particular chiral internucleotidic linkage, wherein the composition is chirally controlled in that it contains a predetermined level of each stereoform.

[0439] In some embodiments, the present disclosure pertains to a chirally controlled oligonucleotide composition comprising a CpG oligonucleotide comprising a strand comprising about 14 to about 49 nucleotides, wherein the strand comprises at least one copy of CpG region motif N₁-(*R/S)-C-(*R/S)-G-(*R/S)-N₂, wherein at least one (*R/S) is a phosphorothioate in the Rp conformation and at least one (*R/S) is a modified internucleotidic linkage in the Sp conformation, and each of N₁ and N₂ is independently any nucleoside.

[0440] In some embodiments, the present disclosure pertains to a chirally controlled oligonucleotide composition comprising a CpG oligonucleotide comprising a strand comprising about 14 to about 49 nucleotides, wherein the strand comprises at least one copy of CpG region motif N₁-(*R/S)-C-(*R/S)-G-(*R/S)-N₂, wherein at least one (*R/S) is a phosphorothioate in the Rp conformation and at least one (*R/S) is a phosphorothioate in the Sp conformation, and each of N₁ and N₂ is independently any nucleoside.

[0441] In some embodiments, the present disclosure pertains to a composition comprising a CpG oligonucleotide comprising a strand comprising about 14 to about 49 nucleotides, wherein the strand comprises at least one copy of CpG region motif N₁-(*R/S)-C-(*R/S)-G-(*R/S)-N₂, wherein at least one (*R/S) is a phosphorothioate in the Rp conformation and at least one (*R/S) is a phosphorothioate in the Sp conformation, and N₁ and N₂ are any nucleoside.

[0442] In some embodiments, the present disclosure pertains to a composition comprising a plurality of oligonucleotides, each of which: (a) hybridizes with a particular target sequence; and (b) comprises a sequence that includes at least one CpG region motif present in all oligonucleotides of the plurality (a “common CpG region motif”), which CpG region motif has a structure: N₁-(*R/S)-C-(*R/S)-G-(*R/S)-N₂; wherein each (*R/S) is independently a chiral internucleotidic linkage, and N₁ and N₂ are any nucleoside.

[0443] In some embodiments, the present disclosure pertains to a composition comprising a plurality of oligonucleotides, each of which: (a) consists of a particular base sequence; and (b) comprises a sequence that includes at least one CpG region motif present in all oligonucleotides of the plurality (a “common CpG region motif”), which CpG region motif has a structure: N₁-(*R/S)-C-(*R/S)-G-(*R/S)-N₂; wherein at least one (*R/S) is a phosphorothioate in the Rp conformation and at least one (*R/S) is a phosphorothioate in the Sp conformation, and each of N₁ and N₂ is independently any nucleoside.

[0444] In some embodiments, the present disclosure pertains to a composition comprising a plurality of oligonucleotides, each of which: (a) hybridizes with a particular target sequence; and (b) has a sequence that includes at least one CpG region motif present in all oligonucleotides of the plurality (a “common CpG region motif”), which CpG region motif has a structure: N₁-(*R/S)-C-(*R/S)-G-(*R/S)-N₂; wherein each (*R/S) is independently a chiral internucleotidic linkage, wherein the composition is chirally controlled in that it contains a predetermined level of each of stereoisomers 1-8 (S1-S8) for each common CpG region motif: S1: N₁-(*R)-C-(*R)-G-(*R)-N₂; S2: N₁-(*R)-C-(*R)-G-(*S)-N₂; S3: N₁-(*R)-C-(*S)-G-(*R)-N₂; S4: N₁-(*R)-C-(*S)-G-(*S)-N₂; S5: N₁-(*S)-C-(*R)-G-(*R)-N₂; S6: N₁-(*S)-C-(*R)-G-(*S)-N₂; S7: N₁-(*S)-C-(*S)-G-(*R)-N₂; S8: N₁-(*S)-C-(*S)-G-(*S)-N₂.

[0445] In some embodiments, the present disclosure pertains to an oligonucleotide composition that is chirally controlled in that the composition comprises a predetermined level of oligonucleotides of an individual oligonucleotide type, wherein an oligonucleotide type is defined by: (1) base sequence; (2) pattern of backbone linkages; (3) pattern of backbone chiral centers; and (4) pattern of backbone phosphorus modifications; wherein each oligonucleotide of the individual oligonucleotide type independently comprises at least one common CpG region motif: N₁-(*R/S)-C-(*R/S)-G-(*R/S)-N₂; wherein each (*R/S) is independently a chiral internucleotidic linkage, and each of N₁ and N₂ is independently any nucleoside.

[0446] In some embodiments, the present disclosure pertains to a composition comprising a plurality of oligonucleotides, each of which: (a) hybridizes with a particular target sequence; (b) has a base sequence that includes at least one C residue in a CpG region motif that is present in all oligonucleotides of the plurality (a “common C residue”) and that has a 5-methyl group, a modified sugar moiety, or both; and (c) includes one or more chiral internucleotidic linkages, so that each oligonucleotide is a particular stereoform, characterized by its stereoidentity at each of the one or more chiral internucleotidic linkages, wherein stereoidentity identifies which stereoisomer is present at a particular chiral internucleotidic linkage, wherein the composition is chirally controlled in that it contains a predetermined level of each stereoform.

[0447] In some embodiments, the present disclosure pertains to an oligonucleotide composition that is chirally controlled in that the composition comprises a predetermined level of oligonucleotides of an individual oligonucleotide type, wherein an oligonucleotide type is defined by: (1) base sequence; (2) pattern of backbone linkages; (3) pattern of backbone chiral centers; and (4) pattern of backbone phosphorus modifications; wherein the base sequence includes at least one C residue in a CpG region motif that has a 5-methyl group, a modified sugar moiety, or both; and the composition has a reduced ability to activate a TLR9-mediated and/or TLR9-associated immune response relative to the ability of a composition that is not chirally controlled in that the composition comprises a random level of oligonucleotides of an individual oligonucleotide type.

[0448] In some embodiments, the present disclosure pertains to a composition comprising a CpG oligonucleotide comprising a strand comprising about 14 to about 49 nucleotides, wherein the strand comprises at least one copy of any CpG region motif disclosed herein.

[0449] In some embodiments, the present disclosure pertains to a composition comprising a CpG oligonucleotide comprising a strand comprising about 14 to about 49 nucleotides, wherein the strand comprises at least one copy of any CpG region motif of any CpG oligonucleotide disclosed herein.

[0450] In some embodiments, the present disclosure pertains to a composition comprising a CpG oligonucleotide comprising a strand comprising about 14 to about 49 nucleotides, wherein the strand comprises or consists of the sequence of any oligonucleotide disclosed herein.

[0451] In some embodiments, the present disclosure pertains to a composition comprising a CpG oligonucleotide comprising a strand comprising 14 to 49 nucleotides, wherein the strand comprises at least one copy of any CpG region motif disclosed herein.

[0452] In some embodiments, the present disclosure pertains to a composition comprising a CpG oligonucleotide comprising a strand comprising 14 to 49 nucleotides, wherein the strand comprises at least one copy of any CpG region motif of any CpG oligonucleotide disclosed herein.

[0453] In some embodiments, the present disclosure pertains to a composition comprising CpG oligonucleotides comprising a strand comprising 14 to 49 nucleotides, wherein the strand comprises at least two copies of any CpG region motif disclosed herein.

[0454] In some embodiments, the present disclosure pertains to a method of agonizing an immune response in a human cell, the method comprising the step of contacting the human cell with a CpG oligonucleotide of any one of the preceding embodiments, wherein the CpG oligonucleotide is capable of agonizing a TLR9-mediated or TLR9-associated immune response.

[0455] In some embodiments, the present disclosure pertains to a method of antagonizing an immune response in a human cell, the method comprising the step of contacting the human cell with a CpG oligonucleotide of any one of the preceding embodiments, wherein the CpG oligonucleotide is capable of antagonizing a TLR9-mediated or TLR9-associated immune response.

[0456] In some embodiments, the present disclosure pertains to a method of modulating an immune response in a subject, the method comprising the step of administering a composition of any one of preceding embodiments, wherein the CpG oligonucleotide is capable of modulating a TLR9-mediated or TLR9-associated immune response.

[0457] In some embodiments, the present disclosure pertains to a method of agonizing an immune response in a human being in need thereof, the method comprising the step of contacting the human with an immunologically effective amount of CpG oligonucleotide of any one of the preceding embodiments.

[0458] In some embodiments, the present disclosure pertains to a method of increasing an immune response to an immunologically active component in a subject, comprising administering an immunologically effective amount of (a) a composition of any one of the preceding embodiments and (b) the immunologically active component.

[0459] In some embodiments, the present disclosure pertains to a method of identifying a second oligonucleotide composition with decreased immune stimulation in a subject compared to a first oligonucleotide composition, the method comprising steps of: (a) measuring the immune stimulation mediated by the first oligonucleotide composition, wherein the first oligonucleotide composition comprising oligonucleotides that have a common base sequence comprising at least one CpG region; (b) measuring the immune stimulation mediated by a second oligonucleotide composition, wherein the second oligonucleotide composition has the same common base sequence as the first oligonucleotide composition, and wherein the CpG region of oligonucleotides of the second composition differs in its pattern of chiral centers from the corresponding region of oligonucleotides of the first oligonucleotide composition; optionally repeating step (b), each repeat with a different second oligonucleotide composition, and selecting a second oligonucleotide composition which mediates less immune stimulation than the first oligonucleotide composition.

[0460] In some embodiments, the present disclosure pertains to a method of improving a characteristic of a CpG oligonucleotide composition comprising at least two CpG oligonucleotides, wherein the method comprises a step of: decreasing the amount in the composition of at least one of the at least two CpG oligonucleotides, wherein each of the at least two CpG oligonucleotides is defined by the stereochemistry of a CpG region motif, and wherein the at least one of the at least two CpG oligonucleotides is determined to have an inferior characteristic relative to the CpG oligonucleotide composition.

[0461] In some embodiments, the present disclosure pertains to a method of improving a characteristic of a stereorandom CpG oligonucleotide composition at least two CpG oligonucleotides, wherein the method comprises a step of: decreasing the amount in the composition of at least one of the at least two CpG oligonucleotides, wherein each of the at least two CpG oligonucleotides is defined by the stereochemistry of a CpG region motif, and wherein the at least one of the at least two CpG oligonucleotides is determined to have an inferior characteristic relative to the CpG oligonucleotide composition, wherein the characteristic is increased activity, improved efficacy, reduced toxicity, increased stability, increased delivery, or increased biological half-life.

[0462] In some embodiments, the present disclosure pertains to a method of designing a second oligonucleotide mediating decreased immune stimulation in a human cell relative to the immune stimulation mediated by a first oligonucleotide, the method comprising the steps of: (a) measuring the immune stimulation mediated by a first oligonucleotide, wherein the first oligonucleotide has a defined base sequence comprising at least one CpG region; (b) measuring the immune stimulation mediated by one or more second oligonucleotides, wherein the second oligonucleotides have the same base sequence as the first oligonucleotide and further comprise one or more phosphorothioates in the CpG region motif, wherein the stereochemistry of the phosphorothioates in the CpG region motif of the second oligonucleotides differs from the stereochemistry of any phosphorothioates in the CpG region motif of the first oligonucleotides, wherein steps (a) and (b) can be performed in any order; selecting a second oligonucleotide which mediates less immune stimulation than the first oligonucleotide.

[0463] In some embodiments, the present disclosure pertains to a method of decreasing the immune stimulation in a human cell mediated by a first oligonucleotide, the method comprising the steps of: (a) providing the first oligonucleotide, wherein the first oligonucleotide has a defined base sequence comprising at least one CpG region; and measuring the immune stimulation in a human cell mediated by the first oligonucleotide; (b) providing one or more second oligonucleotides, wherein the second oligonucleotides have the same base sequence as the first oligonucleotide and further comprise one or more phosphorothioates in the CpG region, wherein the stereochemistry of the phosphorothioates in the CpG region of the second oligonucleotides differs from the stereochemistry of any phosphorothioates in the CpG region of the first oligonucleotides; and measuring the immune stimulation in a human cell of the second oligonucleotides, wherein steps (a) and (b) can be performed in any order; selecting a second oligonucleotide which mediates less immune stimulation than the first oligonucleotide; and contacting the cell with the second oligonucleotide.

[0464] In some embodiments, the present disclosure pertains to a composition comprising an oligonucleotide, wherein the oligonucleotide mediates less immune stimulation than a reference oligonucleotide, wherein the second oligonucleotide is selected using a method comprising the steps of: providing the reference oligonucleotide, wherein the reference oligonucleotide has a defined base sequence comprising at least one CpG region; and measuring the immune stimulation in a human cell mediated by the reference oligonucleotide; providing one or more second oligonucleotides, wherein the second oligonucleotides have the same base sequence as the reference oligonucleotide and further comprise one or more phosphorothioates in the CpG region, wherein the stereochemistry of the phosphorothioates in the CpG region of the second oligonucleotides differs from the stereochemistry of any phosphorothioates in the CpG region of the reference oligonucleotides; and measuring the immune stimulation in a human cell of the second oligonucleotides, wherein steps can be performed in any order; selecting a second oligonucleotide which mediates less immune stimulation than the reference oligonucleotide.

[0465] In some embodiments, the present disclosure pertains to a method of administering a therapeutic oligonucleotide to a subject, wherein the therapeutic oligonucleotide mediates less immune stimulation than a first oligonucleotide. In some embodiments, the therapeutic oligonucleotide is selected using a method comprising the steps of: providing the first oligonucleotide, wherein the first oligonucleotide has a defined base sequence comprising at least one CpG region; and measuring the immune stimulation in a human cell mediated by the first oligonucleotide; providing one or more second oligonucleotides, wherein the second oligonucleotides have the same base sequence as the first oligonucleotide and further comprise one or more phosphorothioates in the CpG region, wherein the stereochemistry of the phosphorothioates in the CpG region of the second oligonucleotides differs from the stereochemistry of any phosphorothioates in the CpG region of the first oligonucleotides; and measuring the immune stimulation in a human cell of the second oligonucleotides, wherein steps can be performed in any order; selecting a second oligonucleotide which mediates less immune stimulation than the first oligonucleotide as the therapeutic oligonucleotide.

[0466] In some embodiments, the present disclosure pertains to a method, comprising administering a composition comprising a first plurality of oligonucleotides, each of which: (a) hybridizes with a particular target sequence; and (b) has base sequence that includes at least one CpG region motif present in all oligonucleotides of the plurality (a “common CpG region motif”), which CpG region motif has a structure: N₁-(*R/S)-C-(*R/S)-G-(*R/S)-N₂; wherein each (*R/S) is independently a chiral internucleotidic linkage, wherein the composition is chirally controlled in that it contains a predetermined level of each of stereoisomers 1-8 (S1-S8) for each common CpG region motif: S1: N₁-(*R)-C-(*R)-G-(*R)-N₂; S2: N₁-(*R)-C-(*R)-G-(*S)-N₂; S3: N₁-(*R)-C-(*S)-G-(*R)-N₂; S4: N₁-(*R)-C-(*S)-G-(*S)-N₂; S5: N₁-(*S)-C-(*R)-G-(*R)-N₂; S6: N₁-(*S)-C-(*R)-G-(*S)-N₂; S7: N₁-(*S)-C-(*S)-G-(*R)-N₂; S8: N₁-(*S)-C-(*S)-G-(*S)-N₂; wherein the composition is characterized by reduced immune stimulation relative to a reference composition, which differs from the composition in that it is stereorandom with respect to internucleotidic linkages of at least one CpG region motif.

[0467] In some embodiments, the present disclosure pertains to: In a method of administering an oligonucleotide composition comprising a plurality of oligonucleotides having a common base sequence, the improvement that comprises: administering a composition comprising a first plurality of oligonucleotides, each of which: (a) hybridizes with a particular target sequence; and (b) has base sequence that includes at least one CpG region motif present in all oligonucleotides of the plurality (a “common CpG region motif”), which CpG region motif has a structure: N₁-(*R/S)-C-(*R/S)-G-(*R/S)-N₂; wherein each (*R/S) is independently a chiral internucleotidic linkage, wherein the composition is chirally controlled in that it contains a predetermined level of each of stereoisomers 1-8 (S1-S8) for each common CpG region motif: S1: N₁-(*R)-C-(*R)-G-(*R)-N₂; S2: N₁-(*R)-C-(*R)-G-(*S)-N₂; S3: N₁-(*R)-C-(*S)-G-(*R)-N₂; S4: N₁-(*R)-C-(*S)-G-(*S)-N₂; S5: N₁-(*S)-C-(*R)-G-(*R)-N₂; S6: N₁-(*S)-C-(*R)-G-(*S)-N₂; S7: N₁-(*S)-C-(*S)-G-(*R)-N₂; S8: N₁-(*S)-C-(*S)-G-(*S)-N₂; wherein the composition is characterized by reduced immune stimulation relative to a reference composition, which differs from the composition in that it is stereorandom with respect to internucleotidic linkages of at least one CpG region motif.

[0468] In some embodiments, the present disclosure pertains to a method, comprising administering a chirally controlled oligonucleotide composition that is chirally controlled in that the composition comprises a predetermined level of oligonucleotides of an individual oligonucleotide type, wherein an oligonucleotide type is defined by: (1) base sequence; (2) pattern of backbone linkages; (3) pattern of backbone chiral centers; and (4) pattern of backbone phosphorus modifications; wherein each oligonucleotide of the individual oligonucleotide type independently comprises at least one copy of a CpG region motif: N₁-(*R/S)-C-(*R/S)-G-(*R/S)-N₂; wherein: each (*R/S) is independently a chiral internucleotidic linkage; oligonucleotides of the individual oligonucleotide type have the common base sequence; and the chirally controlled oligonucleotide composition displays reduced immune stimulation relative to a reference oligonucleotide composition, which reference oligonucleotide composition is a stereorandom oligonucleotide composition comprising oligonucleotides having the same common base sequence, or a chirally controlled oligonucleotide composition of oligonucleotides having the same common base sequence but of a different oligonucleotide type.

[0469] In some embodiments, the present disclosure pertains to: In a method of administering an oligonucleotide composition comprising a plurality of oligonucleotides having a common base sequence, the improvement that comprises: administering a chirally controlled oligonucleotide composition that is chirally controlled in that the composition comprises a predetermined level of oligonucleotides of an individual oligonucleotide type, wherein an oligonucleotide type is defined by: (1) base sequence; (2) pattern of backbone linkages; (3) pattern of backbone chiral centers; and (4) pattern of backbone phosphorus modifications; wherein each oligonucleotide of the individual oligonucleotide type independently comprises at least one copy of a CpG region motif: N₁-(*R/S)-C-(*R/S)-G-(*R/S)-N₂; wherein: each (*R/S) is independently a chiral internucleotidic linkage; oligonucleotides of the individual oligonucleotide type have the common base sequence; and the chirally controlled oligonucleotide composition displays reduced immune stimulation relative to a reference oligonucleotide composition, which reference oligonucleotide composition is a stereorandom oligonucleotide composition comprising oligonucleotides having the same common base sequence, or a chirally controlled oligonucleotide composition of oligonucleotides having the same common base sequence but of a different oligonucleotide type.

[0470] In some embodiments, the present disclosure pertains to a method, comprising administering a chirally controlled oligonucleotide composition, wherein the composition comprises a plurality of oligonucleotides, each of which: (a) hybridizes with a particular target sequence; (b) has a base sequence that includes at least one C residue in a CpG that is present in all oligonucleotides of the plurality (a “common C residue”) and that has a 5-methyl group, a 2′-OMe group in its sugar moiety, or both; and (c) includes one or more chiral internucleotidic linkages, so that each oligonucleotide is a particular stereoform, characterized by its stereoidentity [stereoidentity=which stereoisomer is present at a particular chiral linkage] at each of the one or more chiral internucleotidic linkages, wherein the composition is chirally controlled in that it contains a predetermined level of each stereoform, and the composition is substantially free of those stereoforms that individually, and in the absence of other stereoforms, activate TLR9.

[0471] In a method comprising administering a chirally controlled oligonucleotide composition, wherein the composition comprises a plurality of oligonucleotides, each of which: (a) hybridizes with a particular target sequence; (b) has base sequence that includes at least one C residue in a CpG region motif that is present in all oligonucleotides of the plurality (a “common C residue”) and that has a 5-methyl group, a 2′-OMe group in its sugar moiety, or both; and (c) includes one or more chiral internucleotidic linkages; the improvement that comprises administering a composition comprising a plurality of oligonucleotides, each of which: (a) hybridizes with the same target sequence; (b) has base sequence that includes the same common C residue in a CpG region motif that has a 5-methyl group, a 2′-OMe group in its sugar moiety, or both; and (c) includes one or more chiral internucleotidic linkages, so that each oligonucleotide is a particular stereoform, characterized by its stereoidentity [stereoidentity=which stereoisomer is present at a particular chiral linkage] at each of the one or more chiral internucleotidic linkages, wherein the composition is chirally controlled in that it contains a predetermined level of each stereoform, and the composition is substantially free of those stereoforms that individually, and in the absence of other stereoforms, activate TLR9.

[0472] In some embodiments, the present disclosure pertains to a method, comprising administering a composition that is chirally controlled in that the composition comprises a predetermined level of oligonucleotides of an individual oligonucleotide type, wherein an oligonucleotide type is defined by: (1) base sequence; (2) pattern of backbone linkages; (3) pattern of backbone chiral centers; and (4) pattern of backbone phosphorus modifications; wherein the base sequence includes at least one C residue in a CpG region motif that has a 5-methyl group, a 2′-OMe group in its sugar moiety, or both; and the composition is substantially free of oligonucleotides of a different oligonucleotide type having the same sequence that individually, and in the absence of other stereoforms, activate TLR9.

[0473] In some embodiments, the present disclosure pertains to: In a method comprising administering a composition of oligonucleotides of a common base sequence, wherein the common base sequence includes at least one C residue in a CpG region motif that has a 5-methyl group, a 2′-OMe group in its sugar moiety, or both; the improvement comprises administering a composition that is chirally controlled in that the composition comprises a predetermined level of oligonucleotides of an individual oligonucleotide type, wherein an oligonucleotide type is defined by: (1) base sequence; (2) pattern of backbone linkages; (3) pattern of backbone chiral centers; and (4) pattern of backbone phosphorus modifications; wherein oligonucleotides of the individual oligonucleotide type has the same common sequence, the base sequence includes the same at least one C residue in a CpG region motif that has a 5-methyl group, a 2′-OMe group in its sugar moiety, or both; and the composition is substantially free of oligonucleotides of a different oligonucleotide type having the same sequence that individually, and in the absence of other stereoforms, activate TLR9.

[0474] Provided CpG oligonucleotides can have various patterns of backbone chiral centers including those extensively described in the present disclosure, for example, percentage of Sp, percentage of Rp, specific combinations of Sp and Rp, etc. In some embodiments, provided CpG oligonucleotides have high percentage of Sp, for example, more than above 50%, 55%, 60%, 65%, 70%, 75%, 80%, 85%, 90%, 95%, etc. as described in the present disclosure. In some embodiments, oligonucleotides having high percentage of Sp provide enhanced agonist activities, for example, toward mouse TLR9. In some embodiments, to avoid agonist activities and/or to provide antagonist activities, percentage of Sp is controlled in oligonucleotides. In some embodiments, the internucleotidic linkage of CpG is Rp. In some embodiments, oligonucleotides comprising such Rp-CpG provide enhanced agonist activities, for example, toward mouse TLR9. In some embodiments, to avoid agonist activities and/or to provide antagonist activities, one or more Rp-CpG are eliminated from oligonucleotides. In some embodiments, Sp adjacent to CpG, including those immediately to the 5′- and/or 3′-ends of CpG, enhances agonist activity. In some embodiments, Rp adjacent to CpG, including those immediately to the 5′- and/or 3′-ends of CpG, reduces agonist activities and/or enhances antagonist activities. In some embodiments, provided agonist oligonucleotides comprise a Sp-C-Rp-G-Sp motif. In some embodiments, provided antagonist oligonucleotides comprise a Rp-CpG-Rp motif, wherein the CpG can be either modified or unmodified, and the p, if modified, can be either Rp or Sp. In some embodiments, provided antagonist oligonucleotides comprise a Rp-C-Rp-G-Rp motif. In some embodiments, provided oligonucleotides comprise Sp to the 3′ of CpG. In some embodiments, provided oligonucleotides comprise one or more —CpG-Sp motifs. In some embodiments, such oligonucleotides provide enhanced agonist activities, for example, toward human TLR9. In some embodiments, provided oligonucleotides comprise Rp to the 5′ of CpG. In some embodiments, provided oligonucleotides comprise one or more Rp-CpG- motifs. In some embodiments, such oligonucleotides provide enhanced agonist activities, for example, toward human TLR9. In some embodiments, provided oligonucleotides comprise one or more Rp-CpG-Sp motifs. In some embodiments, provided oligonucleotides comprise one or more Rp-C-Rp-G-Sp motifs. In some embodiments, provided oligonucleotides comprise one or more Rp-C-Sp-G-Sp motifs. In some embodiments, such oligonucleotides provide enhanced agonist activities, for example, toward human TLR9. In some embodiments, CpG and/or its two neighboring nucleosides do not all contain 2′-modifications. In some embodiments, CpG and/or its two neighboring nucleosides do not all contain 2′-MOE. In some embodiments, CpG and/or its two neighboring nucleosides do not contain 2′-modifications. In some embodiments, CpG and/or its two neighboring nucleosides do not contain 2′-MOE. In some embodiments, provided oligonucleotides comprise one or more —CpG-Sp motifs wherein the CpG and/or its two neighboring nucleosides do not all contain 2′-modifications. In some embodiments, provided oligonucleotides comprise one or more Rp-CpG- motifs wherein the CpG and/or its two neighboring nucleosides do not all contain 2′-modifications. In some embodiments, provided oligonucleotides comprise one or more Rp-CpG-Sp motifs wherein the CpG and/or its two neighboring nucleosides do not all contain 2′-modifications. In some embodiments, provided oligonucleotides comprise one or more Rp-C-Rp-G-Sp motifs wherein the CpG and/or its two neighboring nucleosides do not all contain 2′-modifications. In some embodiments, provided oligonucleotides comprise one or more Rp-C-Sp-G-Sp motifs wherein the CpG and/or its two neighboring nucleosides do not all contain 2′-modifications. In some embodiments, provided oligonucleotides comprise Rp to the 3′ of CpG. In some embodiments, provided oligonucleotides comprise one or more —CpG-Rp motifs. In some embodiments, such oligonucleotides provide enhanced agonist activities, for example, toward human TLR9. In some embodiments, provided oligonucleotides comprise Rp to the 5′ of CpG. In some embodiments, provided oligonucleotides comprise one or more Rp-CpG- motifs. In some embodiments, such oligonucleotides provide enhanced agonist activities, for example, toward human TLR9. In some embodiments, provided oligonucleotides comprise one or more Rp-CpG-Rp motifs. In some embodiments, provided oligonucleotides comprise one or more Rp-C-Rp-G-Rp motifs. In some embodiments, provided oligonucleotides comprise one or more Rp-C-Sp-G-Rp motifs. In some embodiments, such oligonucleotides provide enhanced agonist activities, for example, toward human TLR9. In some embodiments, CpG and/or its two neighboring nucleosides contain one or more modified sugars. In some embodiments, CpG and/or its two neighboring nucleosides contain one or more 2′-modifications. In some embodiments, CpG and/or its two neighboring nucleosides contain one or more 2′-MOE. In some embodiments, CpG and/or its two neighboring nucleosides contain one or more modified C. In some embodiments, CpG and/or its two neighboring nucleosides contain one or more 5mC. In some embodiments, provided oligonucleotides comprise one or more —CpG-Rp motifs wherein the CpG and/or its two neighboring nucleosides contain one or more modified sugars. In some embodiments, provided oligonucleotides comprise one or more Rp-CpG- motifs wherein the CpG and/or its two neighboring nucleosides contain one or more modified sugars. In some embodiments, provided oligonucleotides comprise one or more Rp-CpG-Rp motifs wherein the CpG and/or its two neighboring nucleosides contain one or more modified sugars. In some embodiments, provided oligonucleotides comprise one or more Rp-C-Rp-G-Rp motifs wherein the CpG and/or its two neighboring nucleosides contain one or more modified sugars. In some embodiments, provided oligonucleotides comprise one or more -Rp-C-Sp-G-Rp motifs wherein the CpG and/or its two neighboring nucleosides contain one or more modified sugars. In some embodiments, provided oligonucleotides comprise one or more —CpG-Rp motifs wherein the CpG and/or its two neighboring nucleosides contain one or more 2′-modifications. In some embodiments, provided oligonucleotides comprise one or more Rp-CpG- motifs wherein the CpG and/or its two neighboring nucleosides contain one or more 2′-modifications. In some embodiments, provided oligonucleotides comprise one or more Rp-CpG-Rp motifs wherein the CpG and/or its two neighboring nucleosides contain one or more 2′-modifications. In some embodiments, provided oligonucleotides comprise one or more Rp-C-Rp-G-Rp motifs wherein the CpG and/or its two neighboring nucleosides contain one or more 2′-modifications. In some embodiments, provided oligonucleotides comprise one or more -Rp-C-Sp-G-Rp motifs wherein the CpG and/or its two neighboring nucleosides contain one or more 2′-modifications. In some embodiments, provided oligonucleotides comprise one or more —CpG-Rp motifs wherein the CpG and/or its two neighboring nucleosides contain one or more 2′-MOE. In some embodiments, provided oligonucleotides comprise one or more Rp-CpG- motifs wherein the CpG and/or its two neighboring nucleosides contain one or more 2′-MOE. In some embodiments, provided oligonucleotides comprise one or more Rp-CpG-Rp motifs wherein the CpG and/or its two neighboring nucleosides contain one or more 2′-MOE. In some embodiments, provided oligonucleotides comprise one or more Rp-C-Rp-G-Rp motifs wherein the CpG and/or its two neighboring nucleosides contain one or more 2′-MOE. In some embodiments, provided oligonucleotides comprise one or more -Rp-C-Sp-G-Rp motifs wherein the CpG and/or its two neighboring nucleosides contain one or more 2′-MOE. In some embodiments, provided oligonucleotides comprise one or more —CpG-Rp motifs wherein the CpG and/or its two neighboring nucleosides contain one or more modified bases. In some embodiments, provided oligonucleotides comprise one or more Rp-CpG- motifs wherein the CpG and/or its two neighboring nucleosides contain one or more modified bases. In some embodiments, provided oligonucleotides comprise one or more Rp-CpG-Rp motifs wherein the CpG and/or its two neighboring nucleosides contain one or more modified bases. In some embodiments, provided oligonucleotides comprise one or more Rp-C-Rp-G-Rp motifs wherein the CpG and/or its two neighboring nucleosides contain one or more modified bases. In some embodiments, provided oligonucleotides comprise one or more -Rp-C-Sp-G-Rp motifs wherein the CpG and/or its two neighboring nucleosides contain one or more modified bases. In some embodiments, provided oligonucleotides comprise one or more —CpG-Rp motifs wherein the CpG and/or its two neighboring nucleosides contain one or more 5mC. In some embodiments, provided oligonucleotides comprise one or more Rp-CpG- motifs wherein the CpG and/or its two neighboring nucleosides contain one or more 5mC. In some embodiments, provided oligonucleotides comprise one or more Rp-CpG-Rp motifs wherein the CpG and/or its two neighboring nucleosides contain one or more 5mC. In some embodiments, provided oligonucleotides comprise one or more Rp-C-Rp-G-Rp motifs wherein the CpG and/or its two neighboring nucleosides contain one or more 5mC. In some embodiments, provided oligonucleotides comprise one or more -Rp-C-Sp-G-Rp motifs wherein the CpG and/or its two neighboring nucleosides contain one or more 5mC. In some embodiments, provided oligonucleotides comprise one or more —CpG-Rp motifs wherein the CpG and/or its two neighboring nucleosides contain one or more modified sugars and modified bases. In some embodiments, provided oligonucleotides comprise one or more Rp-CpG- motifs wherein the CpG and/or its two neighboring nucleosides contain one or more modified sugars and modified bases. In some embodiments, provided oligonucleotides comprise one or more Rp-CpG-Rp motifs wherein the CpG and/or its two neighboring nucleosides contain one or more modified sugars and modified bases. In some embodiments, provided oligonucleotides comprise one or more Rp-C-Rp-G-Rp motifs wherein the CpG and/or its two neighboring nucleosides contain one or more modified sugars and modified bases. In some embodiments, provided oligonucleotides comprise one or more -Rp-C-Sp-G-Rp motifs wherein the CpG and/or its two neighboring nucleosides contain one or more modified sugars and modified bases. In some embodiments, a modified sugar is a 2′-modified sugar. In some embodiments, a 2′-modification is 2′-OR wherein R is optionally substituted C₁₋₆ aliphatic. In some embodiments, a 2′-modification is 2′-MOE. In some embodiments, a modified base is 5mC. In some embodiments, a modified base is within CpG. In some embodiments, a modified sugar is within CpG. In some embodiments, a modified sugar and a modified base is within CpG. In some embodiments, the C of the CpG comprise a modified sugar. In some embodiments, the C of the CpG comprise a modified base. In some embodiments, the C of the CpG comprise a modified sugar and a modified base. In some embodiments, provided oligonucleotides comprise combinations of CpG motifs described in the present disclosure. A person of ordinary skill in the art appreciates that in accordance with the present disclosure, provided designs of CpG that enhance agonist activities will be avoided when such agonist activities are not desired, and/or or antagonist activities, are desired.

[0475] In some embodiments, to provide antagonist oligonucleotides and compositions thereof, stereochemistry designs for agonist oligonucleotides, particularly the CpG motifs, may be partially or completely reversed. For example, in some embodiments, provided CpG oligonucleotides have high percentage of Rp, for example, more than above 50%, 55%, 60%, 65%, 70%, 75%, 80%, 85%, 90%, 95%, etc. as described in the present disclosure. In some embodiments, oligonucleotides having high percentage of Rp provide enhanced antagonist activities, for example, toward mouse TLR9. Examples include but are not limited to all-Rp (e.g., WV-1386) and Rp-CpG-Rp (e.g., WV-1373).

[0476] The present disclosure pertains to, inter alia, chirally controlled CpG oligonucleotides compositions and methods related to CpG oligonucleotides which comprise one or more copies of a CpG region motif disclosed herein. Various motifs, which are defined at least in part by the stereochemistry of the phosphorothioates in the CpG region, can either agonize or antagonize an immunostimulatory effect. In various embodiments, the CpG region comprises at least one phosphorothioate in the Rp conformation and at least one in the Sp conformation.

[0477] Chirally controlled CpG oligonucleotides compositions comprising agonistic CpG oligonucleotides can be used as immunostimulatory agents, e.g., vaccines, adjuvants or mono-therapies. Chirally controlled CpG oligonucleotides compositions comprising antagonistic CpG oligonucleotides can be used to antagonize an immune response.

[0478] If no immune stimulation is desired, the present disclosure also provides methods of identifying oligonucleotides which have decreased immune stimulation, e.g., those lacking immunostimulatory CpG region motifs. Therapeutic oligonucleotides can thus be screened for immune stimulation, or modified or stereopure versions of these oligonucleotides can be prepared with have less immune stimulation.

[0479] Naturally-occurring nucleotides, as found in RNA and DNA, comprise three components: a phosphate (a phosphodiester linkage), a sugar, and a base. In many synthetic CpG oligonucleotides, the phosphodiester has been replaced by phosphorothioate linkage. In a phosphorothioate, one of the non-bridging oxygen atoms in the phosphodiester linkage is substituted with sulfur. A phosphorothioate reportedly increases stability (e.g., against nucleases). Phosphorothioates reportedly can also increase solubility and membrane penetration. Fiset et al. 2001 Rev. Biol. Biotech. 1: 27-33. Phosphorothioates reportedly also increase affinity of a CpG oligonucleotide to TLR9 and alter the sequence specificity for TLR-mediated responses. Roberts et al. 2011 Mol. Immun. 48: 1027-1034; Haas et al. 2008 Immunity 28: 315-323; Roberts et al. 2005 J. Immun. 174: 605-608.

[0480] Unlike phosphodiester linkages, phosphorothioates are chiral centers and can exist in either an Rp or Sp conformation. The present disclosure shows the surprising result that the conformation of the phosphorothioate in a CpG region motif can greatly alter the agonistic or antagonistic capability of a CpG oligonucleotide. Various of the novel CpG region motifs disclosed herein define particular sequences of phosphorothioate conformations which are agonistic or antagonistic.

[0481] In various other embodiments, the present disclosure pertains to a chirally controlled CpG oligonucleotide composition comprising an agonistic CpG oligonucleotide comprising a strand comprising 15 to 49 nucleotides, wherein the strand comprises one or more copies of any agonistic CpG region motif disclosed herein.

[0482] In various other embodiments, the present disclosure pertains to a chirally controlled CpG oligonucleotide composition comprising an antagonistic CpG oligonucleotide comprising a strand comprising 15 to 49 nucleotides, wherein the strand comprises one or more copies of any antagonistic CpG region motif disclosed herein.

[0483] If no agonism is desired, or if no antagonism is desired, or if neither agonism nor antagonism is desired of a particular oligonucleotide: In various embodiments, the present disclosure pertains to methods of identifying oligonucleotides which have decreased agonism, decreased antagonism, or decreased agonism and antagonism. Oligonucleotides can be screened for agonism or antagonism mediated by CpG region motifs, and modified variants of those oligonucleotides can be prepared which have decreased agonism, decreased antagonism, or decreased agonism and antagonism. The CpG region motifs can comprise, as a non-limiting example, at least one phosphorothioate in the Rp conformation and at least one phosphorothioate in the Sp conformation. In some embodiments, modified variants of those oligonucleotides can be, for example, a stereopure or chirally controlled oligonucleotide composition. In some embodiments, modified variants can also, for example, have higher stability, a shorter length, improved biological activity (e.g., if the oligonucleotide of which the variant is made has a desirable biological activity), etc.

[0484] The present disclosure pertains to, inter alia, chirally controlled CpG oligonucleotides compositions and methods related to CpG oligonucleotides which comprise one or more copies of a CpG region motif disclosed herein.

[0485] In some embodiments, a provided composition is a CpG oligonucleotide composition comprising a plurality of CpG oligonucleotides, which share:
[0486] 1) a common base sequence;
[0487] 2) a common pattern of backbone linkages; and
[0488] 3) a common pattern of backbone phosphorus modifications.

[0489] In some embodiments, a provided composition is a chirally controlled CpG oligonucleotide composition comprising a plurality of CpG oligonucleotides, which share:
[0490] 1) a common base sequence;
[0491] 2) a common pattern of backbone linkages; and
[0492] 3) a common pattern of backbone phosphorus modifications;
   wherein:
[0493] the composition is chirally controlled in that the plurality of CpG oligonucleotides share the same stereochemistry at one or more chiral internucleotidic linkages, and level of the plurality of CpG oligonucleotides in the composition is pre-determined.

[0494] In some embodiments, a provided composition is a partially chirally controlled CpG oligonucleotide composition comprising a plurality of CpG oligonucleotides, which share:
[0495] 1) a common base sequence;
[0496] 2) a common pattern of backbone linkages; and
[0497] 3) a common pattern of backbone phosphorus modifications;
   wherein:
[0498] the composition is partially chirally controlled in that the plurality of CpG oligonucleotides share the same stereochemistry at one or more chiral internucleotidic linkages in the CpG region motif and do not share the same stereochemistry at one or more chiral internucleotidic linkages outside the CpG region motif, and level of the plurality of CpG oligonucleotides in the composition is pre-determined.

[0499] In some embodiments, a provided chirally controlled oligonucleotide composition is a completely chirally controlled oligonucleotide composition.

[0500] In some embodiments, provided oligonucleotides in provided chirally controlled oligonucleotide compositions comprise one or more modified sugars. In some embodiments, a modified sugar comprises a 2′-modification. In some embodiments, a 2′-modification is 2′-OR, wherein R is optionally substituted C₁₋₆ aliphatic. In some embodiments, a 2′-modification is 2′-OMe. In some embodiments, a 2′-modification is 2′-MOE. In some embodiments, a 2′-modification is 2′-F. In some embodiments, a modified sugar is comprises a bicyclic modification. In some embodiments, a modified sugar is a sugar in LNA. In some embodiments, a modification is within a CpG.

[0501] In some embodiments, provided oligonucleotides in provided chirally controlled oligonucleotide composition comprise one or more modified bases. In some embodiments, a modified base is 5mC. In some embodiments, a modification is within a CpG.

[0502] In some embodiments, oligonucleotides in provided chirally controlled oligonucleotide compositions comprise one or more modified sugars and one or more modified bases, for example, those described herein. In some embodiments, the present disclosure surprisingly demonstrates that, despite the widely accepted belief prior to the present disclosure that such sugar and/or base modifications dramatically reduce or completely eliminate TLR9 agonist activities, chirally controlled oligonucleotide compositions of oligonucleotides comprising such modified sugars and bases can provide strong TLR9 agonist activities. In some embodiments, the present disclosure provides chirally controlled oligonucleotide compositions of oligonucleotides comprising one or more modified sugars and one or more modified bases, for example, those described herein, wherein the oligonucleotides provide TLR9 agonist activities. A person having ordinary skill in the art appreciates that various assays, including those described herein, can be utilized to measure TLR9 activities, both in vivo and in vitro, in accordance with the present disclosure for various species. In some embodiments, provided oligonucleotides of such provided chirally controlled oligonucleotide composition comprise modified sugars. In some embodiments, a 2′-modification is 2′-OR, wherein R is optionally substituted C₁₋₆ aliphatic. In some embodiments, a 2′-modification is 2′-OMe. In some embodiments, a 2′-modification is 2′-MOE. In some embodiments, a 2′-modification is 2′-F. In some embodiments, a modified sugar is comprises a bicyclic modification. In some embodiments, a modified sugar is a sugar in LNA. In some embodiments, provided oligonucleotides comprise one or more modified bases. In some embodiments, a modified base is 5mC. In some embodiments, a modification is within a CpG of provided CpG oligonucleotides.

[0503] In some embodiments, a CpG oligonucleotide is selected from: an antisense oligonucleotide, an RNAi agent, a miRNA, splice switching oligonucleotide (SSO), immunomodulatory nucleic acid, an aptamer, a ribozyme, a Piwi-interacting RNA (piRNA), a small nucleolar RNA (snoRNA), a mRNA, a lncRNA, a ncRNA, an antagomir (e.g., an antagonist to a miRNA, lncRNA, ncRNA or other nucleic acid), a plasmid, a vector, or a portion thereof.

[0504] In some embodiments, a common base sequence of a CpG oligonucleotide in a CpG oligonucleotide composition hybridizes with a transcript of dystrophin, Huntingtin, myostatin, a myostatin receptor, ActRIIA, ActRIIB, DMPK, SMN2, dystrophia myotonica protein kinase (DMPK), Proprotein convertase subtilisin/kexin type 9 (PCSK9), SMAD7, transthyretin (TTR), alpha-1 antitrypsin (AAT), aminolevulinate synthase 1 (ALAS1), antithrombin 3 (ATIII), factor VII (FVII), factor XI (FXI), factor XII (FXII), hepcidin antimicrobial peptide (HAMP), a gene of hepatitis B (HBV), hepatitis C (HCV) or hepatitis D (HDV), programmed death-ligand 1 (PD-L1), complement component 5 (C5), transmembrane protease, serine 6 (TMPRSS6), or KRT14 (Keratin 14). In some embodiments, a CpG oligonucleotide is capable of reducing the level and/or activity of a mutant form of any of: dystrophin, Huntingtin, myostatin, a myostatin receptor, ActRIIA, ActRIIB, DMPK, SMN2, dystrophia myotonica protein kinase (DMPK), Proprotein convertase subtilisin/kexin type 9 (PCSK9), SMAD7, transthyretin (TTR), alpha-1 antitrypsin (AAT), aminolevulinate synthase 1 (ALAS1), antithrombin 3 (ATIII), factor VII (FVII), factor XI (FXI), factor XII (FXII), hepcidin antimicrobial peptide (HAMP), a gene of hepatitis B (HBV), hepatitis C (HCV) or hepatitis D (HDV), programmed death-ligand 1 (PD-L1), complement component 5 (C5), transmembrane protease, serine 6 (TMPRSS6), or KRT14 (Keratin 14). In some embodiments, a CpG oligonucleotide is capable of increasing the level and/or activity of a wild-type and/or functional form of any of: dystrophin, Huntingtin, myostatin, a myostatin receptor, ActRIIA, ActRIIB, DMPK, SMN2, dystrophia myotonica protein kinase (DMPK), Proprotein convertase subtilisin/kexin type 9 (PCSK9), SMAD7, transthyretin (TTR), alpha-1 antitrypsin (AAT), aminolevulinate synthase 1 (ALAS1), antithrombin 3 (ATIII), factor VII (FVII), factor XI (FXI), factor XII (FXII), hepcidin antimicrobial peptide (HAMP), a gene of hepatitis B (HBV), hepatitis C (HCV) or hepatitis D (HDV), programmed death-ligand 1 (PD-L1), complement component 5 (C5), transmembrane protease, serine 6 (TMPRSS6), or KRT14 (Keratin 14).

[0505] In some embodiments of a chirally controlled oligonucleotide composition, all chiral internucleotidic linkages are chirally controlled.

[0506] In some embodiments of a chirally controlled oligonucleotide composition, not all chiral internucleotidic linkages are chirally controlled, and a CpG oligonucleotide composition is a partially chirally controlled CpG oligonucleotide composition. In some embodiments, all chiral internucleotidic linkage are chirally controlled, and a CpG oligonucleotide composition is a completely chirally controlled CpG oligonucleotide composition.

[0507] In some embodiments, a chiral internucleoside linkage is a phosphorothioate. In some embodiments, a phosphorothioate can exist in a Rp or Sp conformation. Various other internucleotidic linkages, which can be chiral, are described herein.

[0508] In some embodiments, a CpG oligonucleotide is a nucleic acid described in or produced by a method described in Patent Application Publications US20120316224, US20140194610, US20150211006, WO2015107425, and U.S. Patent Application No. 62/307,542, which CpG oligonucleotides are incorporated herein by reference. In some embodiments, stereoselectivity and/or purity of provided oligonucleotides and compositions thereof can be assessed by stereoselectivity for the formation of each chiral internucleotidic linkage, which can be assessed by stereoselectivity for the formation of a chiral internucleotidic linkage in a model dimer who has the same nucleosides at the 5′- and the 3′-sides of the chiral internucleotidic linkage. Stereoselectivity is typically greater than 95:5, 96:4, 97:3, 98:2 or 99:1 in preparation of provided oligonucleotides and compositions thereof. In some embodiments, solid chemistry is utilized for preparing provided oligonucleotides and compositions. Typically after synthesis, the product is cleaved from the solid support and deprotected, and the product is purified by, for example, anion exchange chromatography, and desired fractions are pooled based on HPLC analysis. In some embodiments, purified pooled fractions are concentrated and diafiltered against water for injection (WFI) and passed through a 0.2 μm filter prior to lyophilization.

[0509] In some embodiments, the sequence of the CpG oligonucleotide in the CpG oligonucleotide composition comprises or consists of the sequence of any CpG oligonucleotide described herein. In some embodiments, the sequence of the CpG region motif in the CpG oligonucleotide in the CpG oligonucleotide composition comprises the sequence of the CpG region motif of any CpG oligonucleotide described, listed or referenced herein. In some embodiments, the CpG oligonucleotide in the CpG oligonucleotide composition is a splice-switching oligonucleotide. In some embodiments, the CpG oligonucleotide in the CpG oligonucleotide composition is capable of skipping or mediating skipping of an exon in the dystrophin gene. In some embodiments, the CpG oligonucleotide in the CpG oligonucleotide composition is capable of skipping or mediating skipping of exon 51 in the dystrophin gene. In some embodiments, the present disclosure pertains to a CpG oligonucleotide composition or chirally controlled CpG oligonucleotide composition, wherein the sequence of the CpG oligonucleotide comprises or consists of the sequence of a CpG oligonucleotide capable of skipping or mediating skipping of exon 51, 45, 53 or 44 in the dystrophin gene.

[0510] In some embodiments, a sequence of a CpG oligonucleotide includes any one or more of: base sequence (including length), pattern of chemical modifications to sugar and base moieties, pattern of backbone linkages (e.g., pattern of natural phosphate linkages, phosphorothioate linkages, phosphorothioate triester linkages, and combinations thereof), pattern of backbone chiral centers (e.g., pattern of stereochemistry (Rp/Sp) of chiral internucleotidic linkages), and pattern of backbone phosphorus modifications (e.g., pattern of modifications on the internucleotidic phosphorus atom, such as —S—, and -L-R¹ of formula I). In some embodiments, a CpG oligonucleotide or CpG oligonucleotide composition of any sequence of any CpG oligonucleotide listed herein can be used in combination with any composition and/or method described herein, including, but not limited to, any combination with any lipid described herein, any additional component described herein, or any other composition (or component thereof) or method described herein.

[0511] In some embodiments, a CpG oligonucleotide comprises one or more chiral internucleotidic linkages. In some embodiments, for CpG oligonucleotides comprising one or more chiral internucleotidic linkages, a provided composition is a chirally controlled CpG oligonucleotide composition of such CpG oligonucleotides in that stereochemistry of at least one of the chiral internucleotidic linkages is controlled. In some embodiments, stereochemistry of each of the chiral internucleotidic linkages is independently controlled, and a provided composition is a completely chirally controlled CpG oligonucleotide composition. In some embodiments, stereochemistry of one or more chiral internucleotidic linkages is controlled (chiral controlled internucleotidic linkages) while stereochemistry of one or more chiral internucleotidic linkages is not controlled (stereorandom/non-chirally controlled internucleotidic linkages), and a provided composition is a partially chirally controlled CpG oligonucleotide composition. In some embodiments, a chirally controlled CpG oligonucleotide composition can be prepared by oligonucleotide synthesis comprising stereoselective formation of one or more or all chiral internucleotidic linkages using, for example, technologies described in Patent Application Publications US20120316224, US20140194610, US20150211006, and WO2015107425.

[0512] In some embodiments, provided oligonucleotides comprise 1 or more chirally controlled internucleotidic linkages. In some embodiments, provided oligonucleotides comprise 2 or more chirally controlled internucleotidic linkages. In some embodiments, provided oligonucleotides comprise 3 or more chirally controlled internucleotidic linkages. In some embodiments, provided oligonucleotides comprise 4 or more chirally controlled internucleotidic linkages. In some embodiments, provided oligonucleotides comprise 5 or more chirally controlled internucleotidic linkages. In some embodiments, provided oligonucleotides comprise 6 or more chirally controlled internucleotidic linkages. In some embodiments, provided oligonucleotides comprise 7 or more chirally controlled internucleotidic linkages. In some embodiments, provided oligonucleotides comprise 8 or more chirally controlled internucleotidic linkages. In some embodiments, provided oligonucleotides comprise 9 or more chirally controlled internucleotidic linkages. In some embodiments, provided oligonucleotides comprise 10 or more chirally controlled internucleotidic linkages. In some embodiments, provided oligonucleotides comprise 11 or more chirally controlled internucleotidic linkages. In some embodiments, provided oligonucleotides comprise 12 or more chirally controlled internucleotidic linkages. In some embodiments, provided oligonucleotides comprise 13 or more chirally controlled internucleotidic linkages. In some embodiments, provided oligonucleotides comprise 14 or more chirally controlled internucleotidic linkages. In some embodiments, provided oligonucleotides comprise 15 or more chirally controlled internucleotidic linkages. In some embodiments, provided oligonucleotides comprise 16 or more chirally controlled internucleotidic linkages. In some embodiments, provided oligonucleotides comprise 17 or more chirally controlled internucleotidic linkages. In some embodiments, provided oligonucleotides comprise 18 or more chirally controlled internucleotidic linkages. In some embodiments, provided oligonucleotides comprise 19 or more chirally controlled internucleotidic linkages. In some embodiments, provided oligonucleotides comprise 20 or more chirally controlled internucleotidic linkages. In some embodiments, provided oligonucleotides comprise 21 or more chirally controlled internucleotidic linkages. In some embodiments, provided oligonucleotides comprise 22 or more chirally controlled internucleotidic linkages. In some embodiments, provided oligonucleotides comprise 23 or more chirally controlled internucleotidic linkages. In some embodiments, provided oligonucleotides comprise 24 or more chirally controlled internucleotidic linkages. In some embodiments, provided oligonucleotides comprise 25 or more chirally controlled internucleotidic linkages.

[0513] In some embodiments, the present disclosure provides a CpG oligonucleotide composition comprising a first plurality of CpG oligonucleotides which have a common base sequence, and comprise one or more modified sugar moieties, one or more natural phosphate linkages, or combinations thereof. In some embodiments, the present disclosure provides a CpG oligonucleotide composition comprising a first plurality of CpG oligonucleotides which have a common base sequence, comprise one or more modified internucleotidic linkages, and comprise one or more modified sugar moieties, one or more natural phosphate linkages, or combinations thereof. In some embodiments, CpG oligonucleotides of a first plurality have a wing-core-wing structure, wherein a wing and a core are different segments or portions of an oligonucleotide or other nucleic acid which have distinct chemistry. In some embodiments, CpG oligonucleotides of a first plurality have a wing-core or core-wing structure (e.g., a hemimer structure). In some embodiments, a wing is also designated a wing region. In some embodiments, a core is also designated a core region. In some embodiments wherein the CpG oligonucleotides of a first plurality have a wing-core-wing structure, the two wings can be chemically identical or distinct (e.g., they can optionally match or differ in any of: sugar modification, internucleotidic linkage, stereochemistry, etc.). In some embodiments, the wings can be the same or different. In some embodiments, a wing comprises a CpG region motif. In some embodiments, two wings comprise a CpG region motif. In some embodiments, a core comprises a CpG region motif. In some embodiments, a wing and a core comprise a CpG region motif. In some embodiments, two wings and a core comprise a CpG region motif. In some embodiments, a wing and/or a core and/or a second wing can each independently comprise one or more CpG region motifs. In some embodiments, each wing region independently comprises one or more natural phosphate linkages and optionally one or more modified internucleotidic linkages, and the core comprises one or more modified internucleotidic linkages and optionally one or more natural phosphate linkages. In some embodiments, each wing region independently comprises one or more natural phosphate linkages and one or more modified internucleotidic linkages, and the core comprises one or more modified internucleotidic linkages and no natural phosphate linkages. In some embodiments, a wing comprises modified sugar moieties. In some embodiments, a modified internucleotidic linkage is phosphorothioate. In some embodiments, a modified internucleotidic linkage is substituted phosphorothioate. In some embodiments, a modified internucleotidic linkage has the structure of formula I described in this disclosure. In some embodiments, a modified sugar moiety is 2′-modified. In some embodiments, a 2′-modification is 2′-OR¹. In some embodiments, such provided compositions have lower toxicity. In some embodiments, provided compositions have lower complement activation.

[0514] In some embodiments, a provided composition is a chirally controlled CpG oligonucleotide composition. In some embodiments, a provided CpG oligonucleotide composition comprising a first plurality of CpG oligonucleotides is chirally controlled, and CpG oligonucleotides of the first plurality comprise a combination of 2′-modification of one or more sugar moieties, one or more natural phosphate linkages, and one or more chiral internucleotidic linkages. In some embodiments, a provided CpG oligonucleotide composition comprising a first plurality of CpG oligonucleotides is chirally controlled, and CpG oligonucleotides of the first plurality comprise a combination of 2′-modification of one or more sugar moieties, one or more natural phosphate linkages, one or more chiral internucleotidic linkages, wherein the 5′- and/or the 3′-end internucleotidic linkages are chiral. In some embodiments, both the 5′- and the 3′-end internucleotidic linkages are chiral. In some embodiments, both the 5′- and the 3′-end internucleotidic linkages are chiral and Sp. In some embodiments, a provided CpG oligonucleotide composition comprising a first plurality of CpG oligonucleotides is chirally controlled, and CpG oligonucleotides of the first plurality comprise a combination of 2′-modification of one or more sugar moieties, one or more natural phosphate linkages, one or more chiral internucleotidic linkages, and a stereochemistry pattern of (Rp)n(Sp)m, (Np)t(Rp)n(Sp)m, or (Sp)t(Rp)n(Sp)m, wherein m >2. In some embodiments, a chiral internucleotidic linkage has the structure of formula I. In some embodiments, a chiral internucleotidic linkage is a phosphorothioate linkage. In some embodiments, a chiral internucleotidic linkage is a substituted phosphorothioate linkage.

[0515] In some embodiments, provided CpG oligonucleotides in provided technologies comprise a wing region and a core region; in some embodiments, such a format is designated a hemimer or hemi-mer. In some embodiments, provided CpG oligonucleotides have a wing-core-wing structure, wherein the core region comprises one or more sugar moieties and/or internucleotidic linkages not in the wing regions. In some embodiments, provided CpG oligonucleotides have a wing-core-wing structure, wherein the core region comprises one or more sugar moieties and internucleotidic linkages not in the wing regions. In some embodiments, provided CpG oligonucleotides have a wing-core-wing structure, wherein the core region comprises one or more sugar moieties not in the wing regions. In some embodiments, provided CpG oligonucleotides have a wing-core-wing structure, wherein the core region comprises one or more internucleotidic linkages not in the wing regions. In some embodiments, a core region comprises a modified sugar moiety. In some embodiments, each sugar moiety in a core region is modified. Example sugar modifications are widely known in the art including but not limited to those described in this disclosure. In some embodiments, each wing region comprises no modified sugar moieties. In some embodiments, a core region comprises one or more natural phosphate linkages. In some embodiments, each internucleotidic linkage following a core nucleoside is natural phosphate linkage. In some embodiments, a wing comprises one or more modified internucleotidic linkages. In some embodiments, each internucleotidic linkage following a core nucleoside is a modified internucleotidic linkage.

[0516] In some embodiments, provided CpG oligonucleotides are blockmers. In some embodiments, provided CpG oligonucleotide are altmers. In some embodiments, provided CpG oligonucleotides are altmers comprising alternating blocks. In some embodiments, a blockmer or an altmer can be defined by chemical modifications (including presence or absence), e.g., base modifications, sugar modification, internucleotidic linkage modifications, stereochemistry, etc.

[0517] In some embodiments, provided CpG oligonucleotides comprise blocks comprising different internucleotidic linkages. In some embodiments, provided CpG oligonucleotides comprise blocks comprising modified internucleotidic linkages and natural phosphate linkages. In some embodiments, provided CpG oligonucleotides comprise blocks comprising different modified internucleotidic linkages. In some embodiments, provided CpG oligonucleotides comprise alternating blocks comprising different internucleotidic linkages. In some embodiments, provided CpG oligonucleotides comprise alternating blocks comprising modified internucleotidic linkages and natural phosphate linkages. In some embodiments, provided CpG oligonucleotides comprise alternating blocks comprising different modified internucleotidic linkages. In some embodiments, a block comprising modified internucleotidic linkages have pattern of backbone chiral centers as described herein. In some embodiments, each block comprising modified internucleotidic linkages has the same pattern of backbone chiral centers. In some embodiments, blocks comprising modified internucleotidic linkages have different patterns of backbone chiral centers. In some embodiments, blocks comprising modified internucleotidic linkages have different length and/or modifications. In some embodiments, blocks comprising modified internucleotidic linkages have the same length and/or modifications. In some embodiments, blocks comprising modified internucleotidic linkages have the same length. In some embodiments, blocks comprising modified internucleotidic linkages have the same internucleotidic linkages.

[0518] In some embodiments, provided CpG oligonucleotides comprise alternating blocks comprising modified sugar moieties and unmodified sugar moieties. In some embodiments, modified sugar moieties comprise 2′-modifications. In some embodiments, provided CpG oligonucleotides comprise alternating 2′-OMe modified sugar moieties and unmodified sugar moieties.

[0519] In some embodiments, provided CpG oligonucleotides comprise alternating blocks comprising different modified sugar moieties and/or unmodified sugar moieties. In some embodiments, provided CpG oligonucleotides comprise alternating blocks comprising different modified sugar moieties and unmodified sugar moieties. In some embodiments, provided CpG oligonucleotides comprise alternating blocks comprising different modified sugar moieties. In some embodiments, provided CpG oligonucleotides comprise alternating blocks comprising different modified sugar moieties, wherein the modified sugar moieties comprise different 2′-modifications. For example, in some embodiments, provided CpG oligonucleotide comprises alternating blocks comprising 2′-OMe and 2′-F, respectively.

[0520] In some embodiments, a type of nucleoside in a region or a CpG oligonucleotide is modified, optionally with a different modification compared to another type of nucleoside. In some embodiments, a type of nucleoside in a region or a CpG oligonucleotide is modified with a different modification compared to another type of nucleoside. For example, in some embodiments, a pyrimidine nucleoside comprises a 2′-F modification, and a purine nucleoside comprises a 2′-OMe modification. In some other embodiments, a pyrimidine nucleoside comprises a 2′-OMe modification, and a purine nucleoside comprises a 2′-F modification.

[0521] In some embodiments, an internucleotidic linkage following an unmodified sugar moiety is a modified internucleotidic linkage. In some embodiments, an internucleotidic linkage after an unmodified sugar moiety is a phosphorothioate linkage. In some embodiments, each internucleotidic linkage after an unmodified sugar moiety is a modified internucleotidic linkage. In some embodiments, each internucleotidic linkage after an unmodified sugar moiety is a phosphorothioate linkage. In some embodiments, an internucleotidic linkage following a modified sugar moiety is a natural phosphate linkage. In some embodiments, each internucleotidic linkage following a modified sugar moiety is a natural phosphate linkage.

[0522] In some embodiments, a provided pattern of backbone chiral centers comprises repeating (Sp)m(Rp)n, (Rp)n(Sp)m, (Np)t(Rp)n(Sp)m, or (Sp)t(Rp)n(Sp)m units. In some embodiments, a repeating unit is (Sp)m(Rp)n. In some embodiments, a repeating unit is SpRp. In some embodiments, a repeating unit is SpSpRp. In some embodiments, a repeating unit is SpRpRp. In some embodiments, a repeating unit is RpRpSp. In some embodiments, a repeating unit is (Rp)n(Sp)m. In some embodiments, a repeating unit is (Np)t(Rp)n(Sp)m. In some embodiments, a repeating unit is (Sp)t(Rp)n(Sp)m.

[0523] In some embodiments, a provided pattern of backbone chiral centers comprises a (Sp)m(Rp)n, (Rp)n(Sp)m, (Np)t(Rp)n(Sp)m, or (Sp)t(Rp)n(Sp)m unit. In some embodiments, a unit is (Sp)m(Rp)n. In some embodiments, a unit is SpRp. In some embodiments, a unit is SpSpRp. In some embodiments, a unit is SpRpRp. In some embodiments, a unit is RpRpSp. In some embodiments, a unit is (Rp)n(Sp)m. In some embodiments, a unit is (Sp)m(Rp)n. In some embodiments, a unit is (Rp)n(Sp)m. In some embodiments, a unit is (Np)t(Rp)n(Sp)m. In some embodiments, a unit is (Sp)t(Rp)n(Sp)m.

[0524] In some embodiments, a provided pattern of backbone chiral centers comprises (Rp/Sp)-(All Rp or All Sp)-(Rp/Sp). In some embodiments, a provided pattern of backbone chiral centers comprises (Rp)-(All Sp)-(Rp). In some embodiments, a provided pattern of backbone chiral centers comprises (Sp)-(All Rp)-(Sp). In some embodiments, a provided pattern of backbone chiral centers comprises (Rp/Sp)-(repeating (Sp)m(Rp)n)-(Rp/Sp). In some embodiments, a provided pattern of backbone chiral centers comprises (Rp/Sp)-(repeating SpSpRp)-(Rp/Sp).

[0525] In some embodiments, a provided pattern of backbone chiral centers is (Rp/Sp)-(All Rp or All Sp)-(Rp/Sp). In some embodiments, a provided pattern of backbone chiral centers is (Sp)-(All Sp)-(Sp). In some embodiments, each chiral internucleotidic linkage is Sp. In some embodiments, a provided pattern of backbone chiral centers is (Rp)-(All Sp)-(Rp). In some embodiments, a provided pattern of backbone chiral centers is (Sp)-(All Rp)-(Sp). In some embodiments, a provided pattern of backbone chiral centers is (Rp/Sp)-(repeating (Sp)m(Rp)n)-(Rp/Sp). In some embodiments, a provided pattern of backbone chiral centers is (Rp/Sp)-(repeating SpSpRp)-(Rp/Sp).

[0526] In some embodiments, the present disclosure provides CpG oligonucleotide compositions having low toxicity. In some embodiments, the present disclosure provides CpG oligonucleotide compositions having improved protein binding profile. In some embodiments, the present disclosure provides CpG oligonucleotide compositions having improved binding to albumin. In some embodiments, provided CpG oligonucleotide compositions have low toxicity and improved binding to certain desired proteins. In some embodiments, provided CpG oligonucleotide compositions have low toxicity and improved binding to certain desired proteins. In some embodiments, provided CpG oligonucleotide compositions at the same time provides the same level of, or greatly enhanced, stability and/or activities, e.g., better target-cleavage pattern, better target-cleavage efficiency, better target specificity, etc.

[0527] In some embodiments, a CpG oligonucleotide composition has at least one improved characteristic or quality related to a reference composition. Example reference compositions comprising a reference plurality of CpG oligonucleotides have been reported in this disclosure. In some embodiments, CpG oligonucleotides of the reference plurality have a different structural elements (chemical modifications, stereochemistry, etc.) compared with chirally controlled CpG oligonucleotides of the first plurality in a provided composition. In some embodiments, a reference composition is a stereorandom preparation of CpG oligonucleotides having the same chemical modifications. In some embodiments, a reference composition is a mixture of stereoisomers while a provided composition is a chirally controlled CpG oligonucleotide composition of one stereoisomer. In some embodiments, CpG oligonucleotides of the reference plurality have the same base sequence as a CpG oligonucleotide of the first plurality in a provided composition. In some embodiments, CpG oligonucleotides of the reference plurality have the same chemical modifications as a CpG oligonucleotide of the first plurality in a provided composition. In some embodiments, CpG oligonucleotides of the reference plurality have the same sugar modifications as a CpG oligonucleotide of the first plurality in a provided composition. In some embodiments, CpG oligonucleotides of the reference plurality have the same base modifications as a CpG oligonucleotide of the first plurality in a provided composition. In some embodiments, CpG oligonucleotides of the reference plurality have the same internucleotidic linkage modifications as a CpG oligonucleotide of the first plurality in a provided composition. In some embodiments, CpG oligonucleotides of the reference plurality have the same stereochemistry as a CpG oligonucleotide of the first plurality in a provided composition but different chemical modifications, e.g., base modification, sugar modification, internucleotidic linkage modifications, etc.

[0528] In some embodiments, the present disclosure provides a CpG oligonucleotide composition comprising a first plurality of CpG oligonucleotides of a particular CpG oligonucleotide type defined by:
[0529] 1) base sequence;
[0530] 2) pattern of backbone linkages;
[0531] 3) pattern of backbone chiral centers; and
[0532] 4) pattern of backbone phosphorus modifications;
[0533] wherein the level of CpG oligonucleotides of the plurality is predetermined.

[0534] In some embodiments, the present disclosure provides a CpG oligonucleotide composition comprising a first plurality of CpG oligonucleotides of a particular CpG oligonucleotide type defined by:
[0535] 1) base sequence;
[0536] 2) pattern of backbone linkages;
[0537] 3) pattern of backbone chiral centers; and
[0538] 4) pattern of backbone phosphorus modifications,
   which composition is chirally controlled in that it is enriched, relative to a substantially racemic preparation of CpG oligonucleotides having the same base sequence, for CpG oligonucleotides of the particular CpG oligonucleotide type.

[0539] In some embodiments, the present disclosure provides a CpG oligonucleotide composition comprising a first plurality of CpG oligonucleotides comprising one or more wing regions and a core region, wherein:
[0540] CpG oligonucleotides of the first plurality have the same base sequence; and
[0541] each wing region independently comprises one or more modified internucleotidic linkages and optionally one or more natural phosphate linkages, and the core region independently comprises one or more modified internucleotidic linkages; or
[0542] each wing region independently comprises one or more modified sugar moieties, and the core region comprises one or more un-modified sugar moieties.

[0543] In some embodiments, the present disclosure provides a CpG oligonucleotide composition comprising a first plurality of CpG oligonucleotides comprising one or more wing regions and a core region, wherein:
[0544] CpG oligonucleotides of the first plurality have the same base sequence;
[0545] each wing region independently has a length of two or more bases, and independently comprises one or more modified internucleotidic linkages and one or more natural phosphate linkages; and
[0546] the core region independently has a length of two or more bases and independently comprises one or more modified internucleotidic linkages.

[0547] In some embodiments, the present disclosure provides a CpG oligonucleotide composition comprising a first plurality of CpG oligonucleotides comprising two wing regions and a core region, wherein:
[0548] CpG oligonucleotides of the first plurality have the same base sequence;
[0549] each wing region independently has a length of two or more bases, and independently comprises one or more modified internucleotidic linkages and one or more natural phosphate linkages; and
[0550] the core region independently has a length of two or more bases and independently comprises one or more modified internucleotidic linkages.

[0551] In some embodiments, the present disclosure provides a CpG oligonucleotide composition comprising a first plurality of CpG oligonucleotides comprising two wing regions and a core region, wherein:
[0552] CpG oligonucleotides of the first plurality have the same base sequence;
[0553] each wing region independently has a length of two or more bases, and independently comprises one or more modified internucleotidic linkages and one or more natural phosphate linkages;
[0554] the wing region to the 5′-end of the core region comprises at least one modified internucleotidic linkage followed by a natural phosphate linkage in the wing; and
[0555] the wing region to the 3′-end of the core region comprises at least one modified internucleotidic linkage preceded by a natural phosphate linkage in the wing;
[0556] the core region independently has a length of two or more bases and independently comprises one or more modified internucleotidic linkages.

[0557] In some embodiments, the present disclosure provides a CpG oligonucleotide composition comprising a first plurality of CpG oligonucleotides comprising a wing region and a core region, wherein:
[0558] CpG oligonucleotides of the first plurality have the same base sequence;
[0559] the wing region has a length of two or more bases, and comprises one or more modified internucleotidic linkages and one or more natural phosphate linkages;
[0560] the wing region is to the 5′-end of the core region and comprises a natural phosphate linkage between the two nucleosides at its 3′-end, or the wing region to the 3′-end of the core region and comprises a natural phosphate linkage between the two nucleosides at its 5′-end; and
[0561] the core region independently has a length of two or more bases and independently comprises one or more modified internucleotidic linkages.

[0562] In some embodiments, the present disclosure provides a CpG oligonucleotide composition comprising a first plurality of CpG oligonucleotides comprising two wing regions and a core region, wherein:
[0563] CpG oligonucleotides of the first plurality have the same base sequence;
[0564] each wing region independently has a length of two or more bases, and independently comprises one or more modified internucleotidic linkages and one or more natural phosphate linkages;
[0565] the wing region to the 5′-end of the core region comprises a natural phosphate linkage between the two nucleosides at its 3′-end;
[0566] the wing region to the 3′-end of a core region comprises a natural phosphate linkage between the two nucleosides at its 5′-end; and
[0567] the core region independently has a length of two or more bases and independently comprises one or more modified internucleotidic linkages.

[0568] In some embodiments, the present disclosure provides a CpG oligonucleotide composition comprising a first plurality of CpG oligonucleotides comprising one or more wing regions and a core region, wherein:
[0569] CpG oligonucleotides of the first plurality have the same base sequence; and
[0570] each wing region independently comprises one or more modified internucleotidic linkages and optionally one or more natural phosphate linkages, and the core region independently comprises one or more modified internucleotidic linkages; and
[0571] each wing region independently comprises one or more modified sugar moieties, and the core region comprises one or more un-modified sugar moieties.

[0572] In some embodiments, the present disclosure provides a CpG oligonucleotide composition comprising a first plurality of CpG oligonucleotides which:
[0573] 1) have a common base sequence; and
[0574] 2) comprise one or more wing regions and a core region;
   wherein:
[0575] each wing region comprises at least one modified sugar moiety; and
[0576] each core region comprises at least one un-modified sugar moiety.

[0577] In some embodiments, the present disclosure provides a chirally controlled CpG oligonucleotide composition, a CpG oligonucleotide being defined by having:
[0578] 1) a common base sequence and length;
[0579] 2) a common pattern of backbone linkages; and
[0580] 3) a common pattern of backbone chiral centers, which composition is a substantially pure preparation of a single CpG oligonucleotide in that a predetermined level of the CpG oligonucleotides in the composition have the common base sequence and length, the common pattern of backbone linkages, and the common pattern of backbone chiral centers.

[0581] In some embodiments, the present disclosure provides a chirally controlled CpG oligonucleotide composition comprising CpG oligonucleotides of a particular CpG oligonucleotide type characterized by:
[0582] 1) a common base sequence and length;
[0583] 2) a common pattern of backbone linkages; and
[0584] 3) a common pattern of backbone chiral centers;
   which composition is chirally controlled in that it is enriched, relative to a substantially racemic preparation of CpG oligonucleotides having the same base sequence and length, for CpG oligonucleotides of the particular CpG oligonucleotide type.

[0585] In some embodiments, the present disclosure provides a chirally controlled CpG oligonucleotide composition, wherein a CpG oligonucleotide of a particular CpG oligonucleotide type is characterized by:
[0586] 1) a common base sequence and length;
[0587] 2) a common pattern of backbone linkages; and
[0588] 3) a common pattern of backbone chiral centers, which composition is a substantially pure preparation of a single CpG oligonucleotide in that at least about 10% of the CpG oligonucleotides in the composition have the common base sequence and length, the common pattern of backbone linkages, and the common pattern of backbone chiral centers.

[0589] In some embodiments, the present disclosure provides a CpG oligonucleotide composition comprising a predetermined level of CpG oligonucleotides which comprise one or more wing regions and a common core region, wherein:
[0590] each wing region independently has a length of two or more bases, and independently and optionally comprises one or more chiral internucleotidic linkages;
[0591] the core region independently has a length of two or more bases, and independently comprises one or more chiral internucleotidic linkages, and the common core region has:
[0592] 1) a common base sequence and length;
[0593] 2) a common pattern of backbone linkages; and
[0594] 3) a common pattern of backbone chiral centers.

[0595] In some embodiments, levels of defined CpG oligonucleotides in provided compositions (e.g., CpG oligonucleotides of a plurality; CpG oligonucleotides of a CpG oligonucleotide type, CpG oligonucleotides defined by sequence, backbone linkages, and/or backbone chiral centers, etc.) are predetermined. In some embodiments, levels of defined CpG oligonucleotides are predetermined in that their absolute or relative (e.g., ratio, percentage, etc.) amounts within a composition is controlled.

[0596] A wing and core can be defined by any structural elements. In some embodiments, a wing and core is defined by nucleoside modifications, wherein a wing comprises a nucleoside modification that the core region does not have. In some embodiments, CpG oligonucleotides in provided compositions have a wing-core structure of nucleoside modification. In some embodiments, CpG oligonucleotides in provided compositions have a core-wing structure of nucleoside modification. In some embodiments, CpG oligonucleotides in provided compositions have a wing-core-wing structure of nucleoside modification. In some embodiments, a wing and core is defined by modifications of the sugar moieties. In some embodiments, a wing and core is defined by modifications of the base moieties. In some embodiments, each sugar moiety in the wing region has the same 2′-modification which is not found in the core region. In some embodiments, each sugar moiety in the wing region has the same 2′-modification which is different than any sugar modifications in the core region. In some embodiments, each sugar moiety in the wing region has the same 2′-modification, and the core region has no 2′-modifications. In some embodiments, when two or more wings are present, each sugar moiety in a wing region has the same 2′-modification, yet the common 2′-modification in a first wing region can either be the same as or different from the common 2′-modification in a second wing region. In some embodiments, a wing and core is defined by pattern of backbone internucleotidic linkages. In some embodiments, a wing comprises a type of internucleotidic linkage, and/or a pattern of internucleotidic linkages, that are not found in a core. In some embodiments, a wing region comprises both a modified internucleotidic linkage and a natural phosphate linkage. In some embodiments, the internucleotidic linkage at the 5′-end of a wing to the 5′-end of the core region is a modified internucleotidic linkage. In some embodiments, the internucleotidic linkage at the 3′-end of a wing to the 3′-end of the core region is a modified internucleotidic linkage. In some embodiments, a modified internucleotidic linkage is a chiral internucleotidic linkage.

[0597] In some embodiments, each wing comprises at least one chiral internucleotidic linkage and at least one natural phosphate linkage. In some embodiments, each wing comprises at least one modified sugar moiety. In some embodiments, each wing sugar moiety is modified. In some embodiments, a wing sugar moiety is modified by a modification that is absent from the core region. In some embodiments, a wing region only has modified internucleotidic linkages at one or both of its ends. In some embodiments, a wing region only has a modified internucleotidic linkage at its 5′-end. In some embodiments, a wing region only has a modified internucleotidic linkage at its 3′-end. In some embodiments, a wing region only has modified internucleotidic linkages at its 5′- and 3′-ends. In some embodiments, a wing is to the 5′-end of a core, and the wing only has a modified internucleotidic linkage at its 5′-end. In some embodiments, a wing is to the 5′-end of a core, and the wing only has a modified internucleotidic linkage at its 3′-end. In some embodiments, a wing is to the 5′-end of a core, and the wing only has modified internucleotidic linkages at both its 5′- and 3′-ends. In some embodiments, a wing is to the 3′-end of a core, and the wing only has a modified internucleotidic linkage at its 5′-end. In some embodiments, a wing is to the 3′-end of a core, and the wing only has a modified internucleotidic linkage at its 3′-end. In some embodiments, a wing is to the 3′-end of a core, and the wing only has modified internucleotidic linkages at both its 5′- and 3′-ends.

[0598] In some embodiments, each internucleotidic linkage within a core region is modified. In some embodiments, each internucleotidic linkage within a core region is chiral. In some embodiments, a core region comprises a pattern of backbone chiral centers of (Sp)m(Rp)n, (Rp)n(Sp)m, (Np)t(Rp)n(Sp)m, or (Sp)t(Rp)n(Sp)m. In some embodiments, the pattern of backbone chiral centers of a core region is (Sp)m(Rp)n, (Rp)n(Sp)m, (Np)t(Rp)n(Sp)m, or (Sp)t(Rp)n(Sp)m. In some embodiments, a core region comprises a pattern of backbone chiral centers of (Rp)n(Sp)m, (Np)t(Rp)n(Sp)m, or (Sp)t(Rp)n(Sp)m, wherein m >2. In some embodiments, the pattern of backbone chiral centers of a core region is (Sp)m(Rp)n, (Rp)n(Sp)m, (Np)t(Rp)n(Sp)m, or (Sp)t(Rp)n(Sp)m, wherein m>2. Among other things, in some embodiments such patterns can provide or enhance controlled cleavage of a target sequence, e.g., an RNA sequence.

[0599] In some embodiments, CpG oligonucleotides in provided compositions have a common pattern of backbone phosphorus modifications. In some embodiments, a provided composition is a CpG oligonucleotide composition that is chirally controlled in that the composition contains a predetermined level of CpG oligonucleotides of an individual CpG oligonucleotide type, wherein a CpG oligonucleotide type is defined by:
[0600] 1) base sequence;
[0601] 2) pattern of backbone linkages;
[0602] 3) pattern of backbone chiral centers; and
[0603] 4) pattern of backbone phosphorus modifications.

[0604] As noted above and understood in the art, in some embodiments, base sequence of a CpG oligonucleotide can refer to the identity and/or modification status of nucleoside residues (e.g., of sugar and/or base components, relative to standard naturally occurring nucleotides such as adenine, cytosine, guanosine, thymine, and uracil) in the CpG oligonucleotide and/or to the hybridization character (i.e., the ability to hybridize with particular complementary residues) of such residues.

[0605] In some embodiments, a particular CpG oligonucleotide type can be defined by
[0606] 1A) base identity;
[0607] 1B) pattern of base modification;
[0608] 1C) pattern of sugar modification;
[0609] 2) pattern of backbone linkages;
[0610] 3) pattern of backbone chiral centers; and
[0611] 4) pattern of backbone phosphorus modifications.
   Thus, in some embodiments, CpG oligonucleotides of a particular type can share identical bases but differ in their pattern of base modifications and/or sugar modifications. In some embodiments, CpG oligonucleotides of a particular type can share identical bases and pattern of base modifications (including, e.g., absence of base modification), but differ in pattern of sugar modifications.

[0612] In some embodiments, the present disclosure provides chirally controlled CpG oligonucleotide compositions of CpG oligonucleotides comprising multiple (e.g., more than 5, 6, 7, 8, 9, or 10) internucleotidic linkages, and particularly for CpG oligonucleotides comprising multiple (e.g., more than 5, 6, 7, 8, 9, or 10) chiral internucleotidic linkages. In some embodiments, for a stereoselective or chirally controlled preparation of CpG oligonucleotides, each chiral internucleotidic linkage is formed with greater than 90:10, 95:5, 96:4, 97:3, or 98:2 diastereoselectivity. In some embodiments, for a stereoselective or chirally controlled preparation of CpG oligonucleotides, each chiral internucleotidic linkage is formed with greater than 95:5 diastereoselectivity. In some embodiments, for a stereoselective or chirally controlled preparation of CpG oligonucleotides, each chiral internucleotidic linkage is formed with greater than 96:4 diastereoselectivity. In some embodiments, for a stereoselective or chirally controlled preparation of CpG oligonucleotides, each chiral internucleotidic linkage is formed with greater than 97:3 diastereoselectivity. In some embodiments, for a stereoselective or chirally controlled preparation of CpG oligonucleotides, each chiral internucleotidic linkage is formed with greater than 98:2 diastereoselectivity. In some embodiments, for a stereoselective or chirally controlled preparation of CpG oligonucleotides, each chiral internucleotidic linkage is formed with greater than 99:1 diastereoselectivity. In some embodiments, diastereoselectivity of a chiral internucleotidic linkage in a CpG oligonucleotide can be measured through a model reaction, e.g. formation of a dimer under essentially the same or comparable conditions wherein the dimer has the same internucleotidic linkage as the chiral internucleotidic linkage, the 5′-nucleoside of the dimer is the same as the nucleoside to the 5′-end of the chiral internucleotidic linkage, and the 3′-nucleoside of the dimer is the same as the nucleoside to the 3′-end of the chiral internucleotidic linkage.

[0613] In some embodiments, the present disclosure provides methods for modulating levels of target nucleic acids in a system comprising administering a provided CpG oligonucleotide composition. In some embodiments, a system is an in vitro system. In some embodiments, a system is a cell. In some embodiments, a system is a tissue. In some embodiments, a system is an organ. In some embodiments, a system is a subject. In some embodiments, a target nucleic acid is genomic DNA. In some embodiments, a target nucleic acid is a transcript. In some embodiments, a target nucleic acid is a primary transcript. In some embodiments, a target nucleic acid is a processed transcript. In some embodiments, a target nucleic acid is a spliced transcript. In some embodiments, a target nucleic acid is RNA. In some embodiments, a target nucleic acid is mRNA. In some embodiments, a target nucleic acid is pre-mRNA.

[0614] In some embodiments, the present disclosure provides a method for treating or preventing a disease, comprising administering to a subject a CpG oligonucleotide composition described herein.

[0615] In some embodiments, the present disclosure provides a method for treating or preventing a disease, comprising administering to a subject a provided CpG oligonucleotide composition.

[0616] In general, properties of CpG oligonucleotide compositions as described herein can be assessed using any appropriate assay. Relative toxicity and/or protein binding properties and/or activity and/or delivery for different compositions (e.g., stereocontrolled vs non-stereocontrolled, and/or different stereocontrolled compositions) are typically desirably determined in the same assay, in some embodiments substantially simultaneously and in some embodiments with reference to historical results.

[0617] Those of skill in the art will be aware of and/or will readily be able to develop appropriate assays for particular CpG oligonucleotide compositions. The present disclosure provides descriptions of certain particular assays, for example that can be useful in assessing one or more features of CpG oligonucleotide composition behavior e.g., complement activation, injection site inflammation, protein biding, etc.

[0618] Among other things, the present disclosure encompasses the recognition that stereorandom CpG oligonucleotide preparations contain a plurality of distinct chemical entities that differ from one another, e.g., in the stereochemical structure of individual backbone chiral centers within the CpG oligonucleotide chain. Without control of stereochemistry of backbone chiral centers, stereorandom CpG oligonucleotide preparations provide uncontrolled compositions comprising undetermined levels of CpG oligonucleotide stereoisomers. Even though these stereoisomers can have the same base sequence, they are different chemical entities at least due to their different backbone stereochemistry, and they can have, as demonstrated herein, different properties, e.g., activities, toxicities, etc. Among other things, the present disclosure provides new compositions that are or contain particular stereoisomers of CpG oligonucleotides of interest. In some embodiments, a particular stereoisomer can be defined, for example, by its base sequence, its length, its pattern of backbone linkages, and its pattern of backbone chiral centers. As is understood in the art, in some embodiments, base sequence can refer to the identity and/or modification status of nucleoside residues (e.g., of sugar and/or base components, relative to standard naturally occurring nucleotides such as adenine, cytosine, guanosine, thymine, and uracil) in a CpG oligonucleotide and/or to the hybridization character (i.e., the ability to hybridize with particular complementary residues) of such residues. In some embodiments, CpG oligonucleotides in provided compositions comprise sugar modifications, e.g., 2′-modifications, at e.g., a wing region. In some embodiments, CpG oligonucleotides in provided compositions comprise a region in the middle, e.g., a core region, that has no sugar modifications. In some embodiments, the present disclosure provide a CpG oligonucleotide composition comprising a predetermined level of CpG oligonucleotides of an individual CpG oligonucleotide type which are chemically identical, e.g., they have the same base sequence, the same pattern of nucleoside modifications (modifications to sugar and base moieties, if any), the same pattern of backbone chiral centers, and the same pattern of backbone phosphorus modifications. The present disclosure demonstrates, among other things, that individual stereoisomers of a particular CpG oligonucleotide can show different stability and/or activity (e.g., functional and/or toxicity properties) from each other. In some embodiments, property improvements achieved through inclusion and/or location of particular chiral structures within a CpG oligonucleotide can be comparable to, or even better than those achieved through use of particular backbone linkages, residue modifications, etc. (e.g., through use of certain types of modified phosphates [e.g., phosphorothioate, substituted phosphorothioate, etc.], sugar modifications [e.g., 2′-modifications, etc.], and/or base modifications [e.g., methylation, etc.]). Among other things, the present disclosure recognizes that, in some embodiments, properties (e.g., activities, toxicities, etc.) of a CpG oligonucleotide can be adjusted by optimizing its pattern of backbone chiral centers, optionally in combination with adjustment/optimization of one or more other features (e.g., linkage pattern, nucleoside modification pattern, etc.) of the CpG oligonucleotide. As exemplified by various examples in the present disclosure, provided chirally controlled CpG oligonucleotide compositions can demonstrate improved properties, such as lower toxicity, improved protein binding profile, improved delivery, etc.

[0619] In some embodiments, CpG oligonucleotide properties can be adjusted by optimizing stereochemistry (pattern of backbone chiral centers) and chemical modifications (modifications of base, sugar, and/or internucleotidic linkage). Among other things, the present disclosure demonstrates that stereochemistry can further improve properties of CpG oligonucleotides comprising chemical modifications. In some embodiments, the present disclosure provides CpG oligonucleotide compositions wherein the CpG oligonucleotides comprise nucleoside modifications, chiral internucleotidic linkages and natural phosphate linkages.

[0620] In some embodiments, the present disclosure provides CpG oligonucleotide compositions which, unexpectedly, greatly improve properties of CpG oligonucleotides. In some embodiments, provided CpG oligonucleotide compositions provides surprisingly low toxicity. In some embodiments, provided CpG oligonucleotide compositions provides surprisingly improved protein binding profile. In some embodiments, provided CpG oligonucleotide compositions provides surprisingly enhanced delivery. In some embodiments, certain property improvement, such as lower toxicity, improved protein binding profile, and/or enhanced delivery, etc., are achieved without sacrificing other properties, e.g., activities, specificity, etc. In some embodiments, provided compositions provides lower toxicity, improved protein binding profile, and/or enhanced delivery, and improved activity, stability, and/or specificity (e.g., target-specificity, cleavage site specificity, etc.). Example improved activities (e.g., enhanced cleavage rates, increased target-specificity, cleavage site specificity, etc.) include but are not limited to those produced by a method described in WO/2014/012081 and WO/2015/107425.

[0621] In some embodiments, a pattern of backbone chiral centers provides increased stability. In some embodiments, a pattern of backbone chiral centers provides surprisingly increased activity. In some embodiments, a pattern of backbone chiral centers provides increased stability and activity. In some embodiments, a pattern of backbone chiral centers provides surprisingly low toxicity. In some embodiments, a pattern of backbone chiral centers provides surprisingly low immune response. In some embodiments, a pattern of backbone chiral centers provides surprisingly low complement activation. In some embodiments, a pattern of backbone chiral centers provides surprisingly low complement activation via the alternative pathway. In some embodiments, a pattern of backbone chiral centers provides surprisingly improved protein binding profile. In some embodiments, a pattern of backbone chiral centers provides surprisingly increased binding to certain proteins. In some embodiments, a pattern of backbone chiral centers provides surprisingly enhanced delivery.

[0622] In some embodiments, a pattern of backbone chiral centers comprises or is (Sp)m(Rp)n, (Rp)n(Sp)m, (Np)t(Rp)n(Sp)m, or (Sp)t(Rp)n(Sp)m. In some embodiments, a pattern of backbone chiral centers comprises or is (Rp)n(Sp)m, (Np)t(Rp)n(Sp)m, or (Sp)t(Rp)n(Sp)m, wherein m >2. In some embodiments, a pattern of backbone chiral centers comprises or is (Rp)n(Sp)m, (Np)t(Rp)n(Sp)m, or (Sp)t(Rp)n(Sp)m, wherein n is 1, t >1, and m >2. In some embodiments, m >3. In some embodiments, m >4. In some embodiments, a pattern of backbone chiral centers comprises one or more achiral natural phosphate linkages.

[0623] In some embodiments, the present disclosure recognizes that chemical modifications, such as modifications of nucleosides and internucleotidic linkages, can provide enhanced properties. In some embodiments, the present disclosure demonstrates that combinations of chemical modifications and stereochemistry can provide unexpected, greatly improved properties (e.g., bioactivity, selectivity, etc.). In some embodiments, chemical combinations, such as modifications of sugars, bases, and/or internucleotidic linkages, are combined with stereochemistry patterns, e.g., (Rp)n(Sp)m, (Np)t(Rp)n(Sp)m, or (Sp)t(Rp)n(Sp)m, to provide CpG oligonucleotides and compositions thereof with surprisingly enhanced properties. In some embodiments, a provided CpG oligonucleotide composition is chirally controlled, and comprises a combination of 2′-modification of one or more sugar moieties, one or more natural phosphate linkages, one or more phosphorothioate linkages, and a stereochemistry pattern of (Rp)n(Sp)m, (Np)t(Rp)n(Sp)m, or (Sp)t(Rp)n(Sp)m, wherein m >2. In some embodiments, n is 1, t >1, and m >2. In some embodiments, m >3. In some embodiments, m >4.

[0624] In some embodiments, a pattern of backbone chiral centers comprises or is (Rp)n(Sp)m, (Sp)t(Rp)n, (Np)t(Rp)n(Sp)m, or (Sp)t(Rp)n(Sp)m. In some embodiments, a pattern of backbone chiral centers comprises or is (Rp)n(Sp)m. In some embodiments, a pattern of backbone chiral centers comprises or is (Sp)t(Rp)n. In some embodiments, a pattern of backbone chiral centers comprises or is (Np)t(Rp)n(Sp)m. In some embodiments, a pattern of backbone chiral centers comprises or is (Sp)t(Rp)n(Sp)m. In some embodiments, each of t and m is independently greater than 1, 2, 3, 4, 5, 6, 7, 8, 9, 10, 11, 12, 13, 14, 15, 16, 17, 18, 19 or 20. In some embodiments, each of t and m is independently greater than 1. In some embodiments, each of t and m is independently greater than 2. In some embodiments, each of t and m is independently greater than 2. In some embodiments, each of t and m is independently greater than 3. In some embodiments, each of t and m is independently greater than 4. In some embodiments, each of t and m is independently greater than 5. In some embodiments, each of t and m is independently greater than 6. In some embodiments, each of t and m is independently greater than 7. In some embodiments, each of t and m is independently greater than 8. In some embodiments, each of t and m is independently greater than 9. In some embodiments, each of t and m is independently greater than 10. In some embodiments, each of t and m is independently greater than 11. In some embodiments, each of t and m is independently greater than 12. In some embodiments, each of t and m is independently greater than 13. In some embodiments, each of t and m is independently greater than 14. In some embodiments, each of t and m is independently greater than 15. In some embodiments, t is greater than 1, 2, 3, 4, 5, 6, 7, 8, 9, 10, 11, 12, 13, 14, 15, 16, 17, 18, 19 or 20. In some embodiments, t is greater than 1. In some embodiments, t is greater than 2. In some embodiments, t is greater than 2. In some embodiments, t is greater than 3. In some embodiments, t is greater than 4. In some embodiments, t is greater than 5. In some embodiments, t is greater than 6. In some embodiments, t is greater than 7. In some embodiments, t is greater than 8. In some embodiments, t is greater than 9. In some embodiments, t is greater than 10. In some embodiments, t is greater than 11. In some embodiments, t is greater than 12. In some embodiments, t is greater than 13. In some embodiments, t is greater than 14. In some embodiments, t is greater than 15. In some embodiments, t is 1, 2, 3, 4, 5, 6, 7, 8, 9, 10, 11, 12, 13, 14, 15, 16, 17, 18, 19 or 20. In some embodiments, t is 1. In some embodiments, t is 2. In some embodiments, t is 2. In some embodiments, t is 3. In some embodiments, t is 4. In some embodiments, t is 5. In some embodiments, t is 6. In some embodiments, t is 7. In some embodiments, t is 8. In some embodiments, t is 9. In some embodiments, t is 10. In some embodiments, t is 11. In some embodiments, t is 12. In some embodiments, t is 13. In some embodiments, t is 14. In some embodiments, t is 15. In some embodiments, m is greater than 1, 2, 3, 4, 5, 6, 7, 8, 9, 10, 11, 12, 13, 14, 15, 16, 17, 18, 19 or 20. In some embodiments, m is greater than 1. In some embodiments, m is greater than 2. In some embodiments, m is greater than 2. In some embodiments, m is greater than 3. In some embodiments, m is greater than 4. In some embodiments, m is greater than 5. In some embodiments, m is greater than 6. In some embodiments, m is greater than 7. In some embodiments, m is greater than 8. In some embodiments, m is greater than 9. In some embodiments, m is greater than 10. In some embodiments, m is greater than 11. In some embodiments, m is greater than 12. In some embodiments, m is greater than 13. In some embodiments, m is greater than 14. In some embodiments, m is greater than 15. In some embodiments, m is 1, 2, 3, 4, 5, 6, 7, 8, 9, 10, 11, 12, 13, 14, 15, 16, 17, 18, 19 or 20. In some embodiments, m is 1. In some embodiments, m is 2. In some embodiments, m is 2. In some embodiments, m is 3. In some embodiments, m is 4. In some embodiments, m is 5. In some embodiments, m is 6. In some embodiments, m is 7. In some embodiments, m is 8. In some embodiments, m is 9. In some embodiments, m is 10. In some embodiments, m is 11. In some embodiments, m is 12. In some embodiments, m is 13. In some embodiments, m is 14. In some embodiments, m is 15. In some embodiments, t=m. In some embodiments, n is greater than 1, 2, 3, 4, 5, 6, 7, 8, 9, 10, 11, 12, 13, 14, 15, 16, 17, 18, 19 or 20. In some embodiments, n is greater than 1. In some embodiments, n is greater than 2. In some embodiments, n is greater than 2. In some embodiments, n is greater than 3. In some embodiments, n is greater than 4. In some embodiments, n is greater than 5. In some embodiments, n is greater than 6. In some embodiments, n is greater than 7. In some embodiments, n is greater than 8. In some embodiments, n is greater than 9. In some embodiments, n is greater than 10. In some embodiments, n is greater than 11. In some embodiments, n is greater than 12. In some embodiments, n is greater than 13. In some embodiments, n is greater than 14. In some embodiments, n is greater than 15. In some embodiments, n is 1, 2, 3, 4, 5, 6, 7, 8, 9, 10, 11, 12, 13, 14, 15, 16, 17, 18, 19 or 20. In some embodiments, n is 1. In some embodiments, n is 2. In some embodiments, n is 2. In some embodiments, n is 3. In some embodiments, n is 4. In some embodiments, n is 5. In some embodiments, n is 6. In some embodiments, n is 7. In some embodiments, n is 8. In some embodiments, n is 9. In some embodiments, n is 10. In some embodiments, n is 11. In some embodiments, n is 12. In some embodiments, n is 13. In some embodiments, n is 14. In some embodiments, n is 15.

[0625] In some embodiments, provided CpG oligonucleotides comprise one or more modified sugar moieties. In some embodiments, provided CpG oligonucleotides comprise one or more modified sugar moieties. In some embodiments, provided CpG oligonucleotides comprise 2 or more modified sugar moieties. In some embodiments, provided CpG oligonucleotides comprise 3 or more modified sugar moieties. In some embodiments, provided CpG oligonucleotides comprise 4 or more modified sugar moieties. In some embodiments, provided CpG oligonucleotides comprise 5 or more modified sugar moieties. In some embodiments, provided CpG oligonucleotides comprise 6 or more modified sugar moieties. In some embodiments, provided CpG oligonucleotides comprise 7 or more modified sugar moieties. In some embodiments, provided CpG oligonucleotides comprise 8 or more modified sugar moieties. In some embodiments, provided CpG oligonucleotides comprise 9 or more modified sugar moieties. In some embodiments, provided CpG oligonucleotides comprise 10 or more modified sugar moieties. In some embodiments, provided CpG oligonucleotides comprise 15 or more modified sugar moieties. In some embodiments, provided CpG oligonucleotides comprise 20 or more modified sugar moieties. In some embodiments, provided CpG oligonucleotides comprise 25 or more modified sugar moieties. In some embodiments, provided CpG oligonucleotides comprise 30 or more modified sugar moieties.

[0626] Provided CpG oligonucleotides can comprise various number of chiral internucleotidic linkages. In some embodiments, provided CpG oligonucleotides comprise no chiral internucleotidic linkages. In some embodiments, provided CpG oligonucleotides comprise one chiral internucleotidic linkage. In some embodiments, provided CpG oligonucleotides comprise 2 or more chiral internucleotidic linkages. In some embodiments, provided CpG oligonucleotides comprise 3 or more chiral internucleotidic linkages. In some embodiments, provided CpG oligonucleotides comprise 4 or more chiral internucleotidic linkages. In some embodiments, provided CpG oligonucleotides comprise 5 or more chiral internucleotidic linkages. In some embodiments, provided CpG oligonucleotides comprise 6 or more chiral internucleotidic linkages. In some embodiments, provided CpG oligonucleotides comprise 7 or more chiral internucleotidic linkages. In some embodiments, provided CpG oligonucleotides comprise 8 or more chiral internucleotidic linkages. In some embodiments, provided CpG oligonucleotides comprise 9 or more chiral internucleotidic linkages. In some embodiments, provided CpG oligonucleotides comprise 10 or more chiral internucleotidic linkages. In some embodiments, provided CpG oligonucleotides comprise 15 or more chiral internucleotidic linkages. In some embodiments, provided CpG oligonucleotides comprise 20 or more chiral internucleotidic linkages. In some embodiments, provided CpG oligonucleotides comprise 25 or more chiral internucleotidic linkages. In some embodiments, provided CpG oligonucleotides comprise 30 or more chiral internucleotidic linkages.

[0627] Provided CpG oligonucleotides can comprise various number of achiral internucleotidic linkages. In some embodiments, provided CpG oligonucleotides comprise no achiral internucleotidic linkages. In some embodiments, provided CpG oligonucleotides comprise one achiral internucleotidiclinkage. In some embodiments, provided CpG oligonucleotides comprise 2 or more achiral internucleotidic linkages. In some embodiments, provided CpG oligonucleotides comprise 3 or more achiral internucleotidic linkages. In some embodiments, provided CpG oligonucleotides comprise 4 or more achiral internucleotidic linkages. In some embodiments, provided CpG oligonucleotides comprise 5 or more achiral internucleotidic linkages. In some embodiments, provided CpG oligonucleotides comprise 6 or more achiral internucleotidic linkages. In some embodiments, provided CpG oligonucleotides comprise 7 or more achiral internucleotidic linkages. In some embodiments, provided CpG oligonucleotides comprise 8 or more achiral internucleotidic linkages. In some embodiments, provided CpG oligonucleotides comprise 9 or more achiral internucleotidic linkages. In some embodiments, provided CpG oligonucleotides comprise 10 or more achiral internucleotidic linkages. In some embodiments, provided CpG oligonucleotides comprise 15 or more achiral internucleotidic linkages. In some embodiments, provided CpG oligonucleotides comprise 20 or more achiral internucleotidic linkages. In some embodiments, provided CpG oligonucleotides comprise 25 or more achiral internucleotidic linkages. In some embodiments, provided CpG oligonucleotides comprise 30 or more achiral internucleotidic linkages.

[0628] In some embodiments, 5% or more of the sugar moieties of provided CpG oligonucleotides are modified. In some embodiments, 10% or more of the sugar moieties of provided CpG oligonucleotides are modified. In some embodiments, 15% or more of the sugar moieties of provided CpG oligonucleotides are modified. In some embodiments, 20% or more of the sugar moieties of provided CpG oligonucleotides are modified. In some embodiments, 25% or more of the sugar moieties of provided CpG oligonucleotides are modified. In some embodiments, 30% or more of the sugar moieties of provided CpG oligonucleotides are modified. In some embodiments, 35% or more of the sugar moieties of provided CpG oligonucleotides are modified. In some embodiments, 40% or more of the sugar moieties of provided CpG oligonucleotides are modified. In some embodiments, 45% or more of the sugar moieties of provided CpG oligonucleotides are modified. In some embodiments, 50% or more of the sugar moieties of provided CpG oligonucleotides are modified. In some embodiments, 55% or more of the sugar moieties of provided CpG oligonucleotides are modified. In some embodiments, 60% or more of the sugar moieties of provided CpG oligonucleotides are modified. In some embodiments, 65% or more of the sugar moieties of provided CpG oligonucleotides are modified. In some embodiments, 70% or more of the sugar moieties of provided CpG oligonucleotides are modified. In some embodiments, 75% or more of the sugar moieties of provided CpG oligonucleotides are modified. In some embodiments, 80% or more of the sugar moieties of provided CpG oligonucleotides are modified. In some embodiments, 85% or more of the sugar moieties of provided CpG oligonucleotides are modified. In some embodiments, 90% or more of the sugar moieties of provided CpG oligonucleotides are modified. In some embodiments, 95% or more of the sugar moieties of provided CpG oligonucleotides are modified. In some embodiments, each sugar moiety of provided CpG oligonucleotides is modified.

[0629] In some embodiments, provided CpG oligonucleotides comprise one or more 2′-F. In some embodiments, provided CpG oligonucleotides comprise two or more 2′-F. In some embodiments, provided CpG oligonucleotides comprise three or more 2′-F. In some embodiments, provided CpG oligonucleotides comprise four or more 2′-F. In some embodiments, provided CpG oligonucleotides comprise five or more 2′-F. In some embodiments, provided CpG oligonucleotides comprise six or more 2′-F. In some embodiments, provided CpG oligonucleotides comprise seven or more 2′-F. In some embodiments, provided CpG oligonucleotides comprise eight or more 2′-F. In some embodiments, provided CpG oligonucleotides comprise nine or more 2′-F. In some embodiments, provided CpG oligonucleotides comprise ten or more 2′-F. In some embodiments, provided CpG oligonucleotides comprise 11 or more 2′-F. In some embodiments, provided CpG oligonucleotides comprise 12 or more 2′-F. In some embodiments, provided CpG oligonucleotides comprise 13 or more 2′-F. In some embodiments, provided CpG oligonucleotides comprise 14 or more 2′-F. In some embodiments, provided CpG oligonucleotides comprise 15 or more 2′-F. In some embodiments, provided CpG oligonucleotides comprise 16 or more 2′-F. In some embodiments, provided CpG oligonucleotides comprise 17 or more 2′-F. In some embodiments, provided CpG oligonucleotides comprise 18 or more 2′-F. In some embodiments, provided CpG oligonucleotides comprise 19 or more 2′-F. In some embodiments, provided CpG oligonucleotides comprise 20 or more 2′-F. In some embodiments, provided CpG oligonucleotides comprise 21 or more 2′-F. In some embodiments, provided CpG oligonucleotides comprise 22 or more 2′-F. In some embodiments, provided CpG oligonucleotides comprise 23 or more 2′-F. In some embodiments, provided CpG oligonucleotides comprise 24 or more 2′-F. In some embodiments, provided CpG oligonucleotides comprise 25 or more 2′-F. In some embodiments, provided CpG oligonucleotides comprise 30 or more 2′-F. In some embodiments, provided CpG oligonucleotides comprise 35 or more 2′-F.

[0630] In some embodiments, provided CpG oligonucleotides comprise one or more consecutive 2′-F. In some embodiments, provided CpG oligonucleotides comprise two or more consecutive 2′-F. In some embodiments, provided CpG oligonucleotides comprise three or more consecutive 2′-F. In some embodiments, provided CpG oligonucleotides comprise four or more consecutive 2′-F. In some embodiments, provided CpG oligonucleotides comprise five or more consecutive 2′-F. In some embodiments, provided CpG oligonucleotides comprise six or more consecutive 2′-F. In some embodiments, provided CpG oligonucleotides comprise seven or more consecutive 2′-F. In some embodiments, provided CpG oligonucleotides comprise eight or more consecutive 2′-F. In some embodiments, provided CpG oligonucleotides comprise nine or more consecutive 2′-F. In some embodiments, provided CpG oligonucleotides comprise ten or more consecutive 2′-F. In some embodiments, provided CpG oligonucleotides comprise 11 or more consecutive 2′-F. In some embodiments, provided CpG oligonucleotides comprise 12 or more consecutive 2′-F. In some embodiments, provided CpG oligonucleotides comprise 13 or more consecutive 2′-F. In some embodiments, provided CpG oligonucleotides comprise 14 or more consecutive 2′-F. In some embodiments, provided CpG oligonucleotides comprise 15 or more consecutive 2′-F. In some embodiments, provided CpG oligonucleotides comprise 16 or more consecutive 2′-F. In some embodiments, provided CpG oligonucleotides comprise 17 or more consecutive 2′-F. In some embodiments, provided CpG oligonucleotides comprise 18 or more consecutive 2′-F. In some embodiments, provided CpG oligonucleotides comprise 19 or more consecutive 2′-F. In some embodiments, provided CpG oligonucleotides comprise 20 or more consecutive 2′-F. In some embodiments, provided CpG oligonucleotides comprise 21 or more consecutive 2′-F. In some embodiments, provided CpG oligonucleotides comprise 22 or more consecutive 2′-F. In some embodiments, provided CpG oligonucleotides comprise 23 or more consecutive 2′-F. In some embodiments, provided CpG oligonucleotides comprise 24 or more consecutive 2′-F. In some embodiments, provided CpG oligonucleotides comprise 25 or more consecutive 2′-F. In some embodiments, provided CpG oligonucleotides comprise 30 or more consecutive 2′-F. In some embodiments, provided CpG oligonucleotides comprise 35 or more consecutive 2′-F.

[0631] In some embodiments, a nucleoside comprising a 2′-modification is followed by a modified internucleotidic linkage. In some embodiments, a nucleoside comprising a 2′-modification is preceded by a modified internucleotidic linkage. In some embodiments, a modified internucleotidic linkage is a chiral internucleotidic linkage. In some embodiments, a modified internucleotidic linkage is a phosphorothioate. In some embodiments, a chiral internucleotidic linkage is Sp. In some embodiments, a nucleoside comprising a 2′-modification is followed by an Sp chiral internucleotidic linkage. In some embodiments, a nucleoside comprising a 2′-F is followed by an Sp chiral internucleotidic linkage. In some embodiments, a nucleoside comprising a 2′-modification is preceded by an Sp chiral internucleotidic linkage. In some embodiments, a nucleoside comprising a 2′-F is preceded by an Sp chiral internucleotidic linkage. In some embodiments, a chiral internucleotidic linkage is Rp. In some embodiments, a nucleoside comprising a 2′-modification is followed by an Rp chiral internucleotidic linkage. In some embodiments, a nucleoside comprising a 2′-F is followed by an Rp chiral internucleotidic linkage. In some embodiments, a nucleoside comprising a 2′-modification is preceded by an Rp chiral internucleotidic linkage. In some embodiments, a nucleoside comprising a 2′-F is preceded by an Rp chiral internucleotidic linkage.

[0632] In some embodiments, provided CpG oligonucleotides comprise one or more natural phosphate linkages and one or more modified internucleotidic linkages.

[0633] Provided CpG oligonucleotides can comprise various number of natural phosphate linkages. In some embodiments, provided CpG oligonucleotides comprise no natural phosphate linkages. In some embodiments, provided CpG oligonucleotides comprise one natural phosphate linkage. In some embodiments, provided CpG oligonucleotides comprise 2 or more natural phosphate linkages. In some embodiments, provided CpG oligonucleotides comprise 3 or more natural phosphate linkages. In some embodiments, provided CpG oligonucleotides comprise 4 or more natural phosphate linkages. In some embodiments, provided CpG oligonucleotides comprise 5 or more natural phosphate linkages. In some embodiments, provided CpG oligonucleotides comprise 6 or more natural phosphate linkages. In some embodiments, provided CpG oligonucleotides comprise 7 or more natural phosphate linkages. In some embodiments, provided CpG oligonucleotides comprise 8 or more natural phosphate linkages. In some embodiments, provided CpG oligonucleotides comprise 9 or more natural phosphate linkages. In some embodiments, provided CpG oligonucleotides comprise 10 or more natural phosphate linkages. In some embodiments, provided CpG oligonucleotides comprise 15 or more natural phosphate linkages. In some embodiments, provided CpG oligonucleotides comprise 20 or more natural phosphate linkages. In some embodiments, provided CpG oligonucleotides comprise 25 or more natural phosphate linkages. In some embodiments, provided CpG oligonucleotides comprise 30 or more natural phosphate linkages.

[0634] In some embodiments, 5% or more of the internucleotidic linkages of provided CpG oligonucleotides are natural phosphate linkages. In some embodiments, 10% or more of the internucleotidic linkages of provided CpG oligonucleotides are natural phosphate linkages. In some embodiments, 15% or more of the internucleotidic linkages of provided CpG oligonucleotides are natural phosphate linkages. In some embodiments, 20% or more of the internucleotidic linkages of provided CpG oligonucleotides are natural phosphate linkages. In some embodiments, 25% or more of the internucleotidic linkages of provided CpG oligonucleotides are natural phosphate linkages. In some embodiments, 30% or more of the internucleotidic linkages of provided CpG oligonucleotides are natural phosphate linkages. In some embodiments, 35% or more of the internucleotidic linkages of provided CpG oligonucleotides are natural phosphate linkages. In some embodiments, 40% or more of the internucleotidic linkages of provided CpG oligonucleotides are natural phosphate linkages. In some embodiments, 45% or more of the internucleotidic linkages of provided CpG oligonucleotides are natural phosphate linkages. In some embodiments, 50% or more of the internucleotidic linkages of provided CpG oligonucleotides are natural phosphate linkages. In some embodiments, 55% or more of the internucleotidic linkages of provided CpG oligonucleotides are natural phosphate linkages. In some embodiments, 60% or more of the internucleotidic linkages of provided CpG oligonucleotides are natural phosphate linkages. In some embodiments, 65% or more of the internucleotidic linkages of provided CpG oligonucleotides are natural phosphate linkages. In some embodiments, 70% or more of the internucleotidic linkages of provided CpG oligonucleotides are natural phosphate linkages. In some embodiments, 75% or more of the internucleotidic linkages of provided CpG oligonucleotides are natural phosphate linkages. In some embodiments, 80% or more of the internucleotidic linkages of provided CpG oligonucleotides are natural phosphate linkages. In some embodiments, 85% or more of the internucleotidic linkages of provided CpG oligonucleotides are natural phosphate linkages. In some embodiments, 90% or more of the internucleotidic linkages of provided CpG oligonucleotides are natural phosphate linkages. In some embodiments, 95% or more of the internucleotidic linkages of provided CpG oligonucleotides are natural phosphate linkages.

[0635] In some embodiments, provided CpG oligonucleotides comprise no more than about 25 consecutive unmodified sugar moieties. In some embodiments, provided CpG oligonucleotides comprise no more than about 20 consecutive unmodified sugar moieties. In some embodiments, provided CpG oligonucleotides comprise no more than about 15 consecutive unmodified sugar moieties. In some embodiments, provided CpG oligonucleotides comprise no more than about 10 consecutive unmodified sugar moieties. In some embodiments, provided CpG oligonucleotides comprise no more than about 9 consecutive unmodified sugar moieties. In some embodiments, provided CpG oligonucleotides comprise no more than about 8 consecutive unmodified sugar moieties. In some embodiments, provided CpG oligonucleotides comprise no more than about 7 consecutive unmodified sugar moieties. In some embodiments, provided CpG oligonucleotides comprise no more than about 6 consecutive unmodified sugar moieties. In some embodiments, provided CpG oligonucleotides comprise no more than about 5 consecutive unmodified sugar moieties. In some embodiments, provided CpG oligonucleotides comprise no more than about 4 consecutive unmodified sugar moieties. In some embodiments, provided CpG oligonucleotides comprise no more than about 3 consecutive unmodified sugar moieties. In some embodiments, provided CpG oligonucleotides comprise no more than about 2 consecutive unmodified sugar moieties. In some embodiments, provided CpG oligonucleotides comprise no more than about 25 unmodified sugar moieties. In some embodiments, provided CpG oligonucleotides comprise no more than about 20 unmodified sugar moieties. In some embodiments, provided CpG oligonucleotides comprise no more than about 15 unmodified sugar moieties. In some embodiments, provided CpG oligonucleotides comprise no more than about 10 unmodified sugar moieties. In some embodiments, provided CpG oligonucleotides comprise no more than about 5 unmodified sugar moieties.

[0636] In some embodiments, provided CpG oligonucleotides comprise no more than about 95% unmodified sugar moieties. In some embodiments, provided CpG oligonucleotides comprise no more than about 90% unmodified sugar moieties. In some embodiments, provided CpG oligonucleotides comprise no more than about 85% unmodified sugar moieties. In some embodiments, provided CpG oligonucleotides comprise no more than about 80% unmodified sugar moieties. In some embodiments, provided CpG oligonucleotides comprise no more than about 70% unmodified sugar moieties. In some embodiments, provided CpG oligonucleotides comprise no more than about 60% unmodified sugar moieties. In some embodiments, provided CpG oligonucleotides comprise no more than about 50% unmodified sugar moieties. In some embodiments, provided CpG oligonucleotides comprise no more than about 40% unmodified sugar moieties. In some embodiments, provided CpG oligonucleotides comprise no more than about 30% unmodified sugar moieties. In some embodiments, provided CpG oligonucleotides comprise no more than about 20% unmodified sugar moieties. In some embodiments, provided CpG oligonucleotides comprise no more than about 10% unmodified sugar moieties. In some embodiments, provided CpG oligonucleotides comprise no more than about 5% unmodified sugar moieties. In some embodiments, provided CpG oligonucleotides comprise no more than about 15 consecutive unmodified sugar moieties. In some embodiments, provided CpG oligonucleotides comprise no more than about 10 consecutive unmodified sugar moieties. In some embodiments, provided CpG oligonucleotides comprise no more than about 9 consecutive unmodified sugar moieties. In some embodiments, provided CpG oligonucleotides comprise no more than about 8 consecutive unmodified sugar moieties. In some embodiments, provided CpG oligonucleotides comprise no more than about 7 consecutive unmodified sugar moieties. In some embodiments, provided CpG oligonucleotides comprise no more than about 6 consecutive unmodified sugar moieties. In some embodiments, provided CpG oligonucleotides comprise no more than about 5 consecutive unmodified sugar moieties. In some embodiments, provided CpG oligonucleotides comprise no more than about 4 consecutive unmodified sugar moieties. In some embodiments, provided CpG oligonucleotides comprise no more than about 3 consecutive unmodified sugar moieties. In some embodiments, provided CpG oligonucleotides comprise no more than about 2 consecutive unmodified sugar moieties. In some embodiments, provided CpG oligonucleotides comprise no more than about 25 unmodified sugar moieties. In some embodiments, provided CpG oligonucleotides comprise no more than about 20 unmodified sugar moieties. In some embodiments, provided CpG oligonucleotides comprise no more than about 15 unmodified sugar moieties. In some embodiments, provided CpG oligonucleotides comprise no more than about 10 unmodified sugar moieties. In some embodiments, provided CpG oligonucleotides comprise no more than about 5 unmodified sugar moieties.

[0637] In some embodiments, provided CpG oligonucleotides comprise no more than about 95% unmodified sugar moieties. In some embodiments, provided CpG oligonucleotides comprise no more than about 90% unmodified sugar moieties. In some embodiments, provided CpG oligonucleotides comprise no more than about 85% unmodified sugar moieties. In some embodiments, provided CpG oligonucleotides comprise no more than about 80% unmodified sugar moieties. In some embodiments, provided CpG oligonucleotides comprise no more than about 70% unmodified sugar moieties. In some embodiments, provided CpG oligonucleotides comprise no more than about 60% unmodified sugar moieties. In some embodiments, provided CpG oligonucleotides comprise no more than about 50% unmodified sugar moieties. In some embodiments, provided CpG oligonucleotides comprise no more than about 40% unmodified sugar moieties. In some embodiments, provided CpG oligonucleotides comprise no more than about 30% unmodified sugar moieties. In some embodiments, provided CpG oligonucleotides comprise no more than about 20% unmodified sugar moieties. In some embodiments, provided CpG oligonucleotides comprise no more than about 10% unmodified sugar moieties. In some embodiments, provided CpG oligonucleotides comprise no more than about 5% unmodified sugar moieties. In some embodiments, each sugar moiety of the CpG oligonucleotides of the first plurality is independently modified.

[0638] In some embodiments, provided CpG oligonucleotides comprise two or more modified internucleotidic linkages. In some embodiments, provided CpG oligonucleotides comprise three or more modified internucleotidic linkages. In some embodiments, provided CpG oligonucleotides comprise four or more modified internucleotidic linkages. In some embodiments, provided CpG oligonucleotides comprise five or more modified internucleotidic linkages. In some embodiments, provided CpG oligonucleotides comprise ten or more modified internucleotidic linkages. In some embodiments, provided CpG oligonucleotides comprise about 15 or more modified internucleotidic linkages. In some embodiments, provided CpG oligonucleotides comprise about 20 or more modified internucleotidic linkages. In some embodiments, provided CpG oligonucleotides comprise about 25 or more modified internucleotidic linkages.

[0639] In some embodiments, about 5% of the internucleotidic linkages in provided CpG oligonucleotides are modified internucleotidic linkages. In some embodiments, about 10% of the internucleotidic linkages in provided CpG oligonucleotides are modified internucleotidic linkages. In some embodiments, about 20% of the internucleotidic linkages in provided CpG oligonucleotides are modified internucleotidic linkages. In some embodiments, about 30% of the internucleotidic linkages in provided CpG oligonucleotides are modified internucleotidic linkages. In some embodiments, about 40% of the internucleotidic linkages in provided CpG oligonucleotides are modified internucleotidic linkages. In some embodiments, about 50% of the internucleotidic linkages in provided CpG oligonucleotides are modified internucleotidic linkages. In some embodiments, about 60% of the internucleotidic linkages in provided CpG oligonucleotides are modified internucleotidic linkages. In some embodiments, about 70% of the internucleotidic linkages in provided CpG oligonucleotides are modified internucleotidic linkages. In some embodiments, about 80% of the internucleotidic linkages in provided CpG oligonucleotides are modified internucleotidic linkages. In some embodiments, about 85% of the internucleotidic linkages in provided CpG oligonucleotides are modified internucleotidic linkages. In some embodiments, about 90% of the internucleotidic linkages in provided CpG oligonucleotides are modified internucleotidic linkages. In some embodiments, about 95% of the internucleotidic linkages in provided CpG oligonucleotides are modified internucleotidic linkages.

[0640] In some embodiments, provided CpG oligonucleotides comprise no more than about 25 consecutive natural phosphate linkages. In some embodiments, provided CpG oligonucleotides comprise no more than about 20 consecutive natural phosphate linkages. In some embodiments, provided CpG oligonucleotides comprise no more than about 15 consecutive natural phosphate linkages. In some embodiments, provided CpG oligonucleotides comprise no more than about 10 consecutive natural phosphate linkages. In some embodiments, provided CpG oligonucleotides comprise no more than about 9 consecutive natural phosphate linkages. In some embodiments, provided CpG oligonucleotides comprise no more than about 8 consecutive natural phosphate linkages. In some embodiments, provided CpG oligonucleotides comprise no more than about 7 consecutive natural phosphate linkages. In some embodiments, provided CpG oligonucleotides comprise no more than about 6 consecutive natural phosphate linkages. In some embodiments, provided CpG oligonucleotides comprise no more than about 5 consecutive natural phosphate linkages. In some embodiments, provided CpG oligonucleotides comprise no more than about 4 consecutive natural phosphate linkages. In some embodiments, provided CpG oligonucleotides comprise no more than about 3 consecutive natural phosphate linkages. In some embodiments, provided CpG oligonucleotides comprise no more than about 2 consecutive natural phosphate linkages. In some embodiments, provided CpG oligonucleotides comprise no more than about 25 natural phosphate linkages. In some embodiments, provided CpG oligonucleotides comprise no more than about 20 natural phosphate linkages. In some embodiments, provided CpG oligonucleotides comprise no more than about 15 natural phosphate linkages. In some embodiments, provided CpG oligonucleotides comprise no more than about 10 natural phosphate linkages. In some embodiments, provided CpG oligonucleotides comprise no more than about 5 natural phosphate linkages. In some embodiments, provided CpG oligonucleotides comprise no more than about 95% natural phosphate linkages. In some embodiments, provided CpG oligonucleotides comprise no more than about 90% natural phosphate linkages. In some embodiments, provided CpG oligonucleotides comprise no more than about 85% natural phosphate linkages. In some embodiments, provided CpG oligonucleotides comprise no more than about 80% natural phosphate linkages. In some embodiments, provided CpG oligonucleotides comprise no more than about 70% natural phosphate linkages. In some embodiments, provided CpG oligonucleotides comprise no more than about 60% natural phosphate linkages. In some embodiments, provided CpG oligonucleotides comprise no more than about 50% natural phosphate linkages. In some embodiments, provided CpG oligonucleotides comprise no more than about 40% natural phosphate linkages. In some embodiments, provided CpG oligonucleotides comprise no more than about 30% natural phosphate linkages. In some embodiments, provided CpG oligonucleotides comprise no more than about 20% natural phosphate linkages. In some embodiments, provided CpG oligonucleotides comprise no more than about 10% natural phosphate linkages. In some embodiments, provided CpG oligonucleotides comprise no more than about 5% natural phosphate linkages.

[0641] In some embodiments, provided CpG oligonucleotides comprise no DNA nucleotide. A DNA nucleotide is a nucleotide in which the sugar moiety is an unmodified DNA sugar moiety, and the internucleotidic linkage is a natural phosphate linkage. In some embodiments, provided CpG oligonucleotides comprise no more than 2 DNA nucleotides. In some embodiments, provided CpG oligonucleotides comprise no more than 3 DNA nucleotides. In some embodiments, provided CpG oligonucleotides comprise no more than 4 DNA nucleotides. In some embodiments, provided CpG oligonucleotides comprise no more than 5 DNA nucleotides. In some embodiments, provided CpG oligonucleotides comprise no more than 6 DNA nucleotides. In some embodiments, provided CpG oligonucleotides comprise no more than 7 DNA nucleotides. In some embodiments, provided CpG oligonucleotides comprise no more than 8 DNA nucleotides. In some embodiments, provided CpG oligonucleotides comprise no more than 9 DNA nucleotides. In some embodiments, provided CpG oligonucleotides comprise no more than 10 DNA nucleotides. In some embodiments, provided CpG oligonucleotides comprise no more than 11 DNA nucleotides. In some embodiments, provided CpG oligonucleotides comprise no more than 12 DNA nucleotides. In some embodiments, provided CpG oligonucleotides comprise no more than 13 DNA nucleotides. In some embodiments, provided CpG oligonucleotides comprise no more than 14 DNA nucleotides. In some embodiments, provided CpG oligonucleotides comprise no more than 15 DNA nucleotides. In some embodiments, provided CpG oligonucleotides comprise no more than 20 DNA nucleotides. In some embodiments, provided CpG oligonucleotides comprise no more than 25 DNA nucleotides. In some embodiments, provided CpG oligonucleotides comprise no more than 30 DNA nucleotides.

[0642] In some embodiments, provided CpG oligonucleotides comprise no more than 2 consecutive DNA nucleotides. In some embodiments, provided CpG oligonucleotides comprise no more than 3 consecutive DNA nucleotides. In some embodiments, provided CpG oligonucleotides comprise no more than 4 consecutive DNA nucleotides. In some embodiments, provided CpG oligonucleotides comprise no more than 5 consecutive DNA nucleotides. In some embodiments, provided CpG oligonucleotides comprise no more than 6 consecutive DNA nucleotides. In some embodiments, provided CpG oligonucleotides comprise no more than 7 consecutive DNA nucleotides. In some embodiments, provided CpG oligonucleotides comprise no more than 8 consecutive DNA nucleotides. In some embodiments, provided CpG oligonucleotides comprise no more than 9 consecutive DNA nucleotides. In some embodiments, provided CpG oligonucleotides comprise no more than 10 consecutive DNA nucleotides. In some embodiments, provided CpG oligonucleotides comprise no more than 11 consecutive DNA nucleotides. In some embodiments, provided CpG oligonucleotides comprise no more than 12 consecutive DNA nucleotides. In some embodiments, provided CpG oligonucleotides comprise no more than 13 consecutive DNA nucleotides. In some embodiments, provided CpG oligonucleotides comprise no more than 14 consecutive DNA nucleotides. In some embodiments, provided CpG oligonucleotides comprise no more than 15 consecutive DNA nucleotides. In some embodiments, provided CpG oligonucleotides comprise no more than 20 consecutive DNA nucleotides. In some embodiments, provided CpG oligonucleotides comprise no more than 25 consecutive DNA nucleotides. In some embodiments, provided CpG oligonucleotides comprise no more than 30 consecutive DNA nucleotides.

[0643] In some embodiments, provided CpG oligonucleotides comprise two wing and one core regions. In some embodiments, provided CpG oligonucleotides comprises a 5′-wing-core-wing-3′ structure. In some embodiments, provided CpG oligonucleotides are of a 5′-wing-core-wing-3′ gapmer structure. In some embodiments, the two wing regions are identical. In some embodiments, the two wing regions are different. In some embodiments, the two wing regions are identical in chemical modifications. In some embodiments, the two wing regions are identical in 2′-modifications. In some embodiments, the two wing regions are identical in internucleotidic linkage modifications. In some embodiments, the two wing regions are identical in patterns of backbone chiral centers. In some embodiments, the two wing regions are identical in pattern of backbone linkages. In some embodiments, the two wing regions are identical in pattern of backbone linkage types. In some embodiments, the two wing regions are identical in pattern of backbone phosphorus modifications.

[0644] In some embodiments, provided CpG oligonucleotides comprise one wing and one core regions. In some embodiments, provided CpG oligonucleotides comprises a 5′-wing-core-3′ hemimer structure. In some embodiments, provided CpG oligonucleotides are of a 5′-wing-core-3′ hemimer structure. In some embodiments, provided CpG oligonucleotides comprises a 5′-core-wing-3′ hemimer structure. In some embodiments, provided CpG oligonucleotides are of a 5′-core-wing-3′ hemimer structure.

[0645] A wing region can be differentiated from a core region in that a wing region contains a different structure feature than a core region. For example, in some embodiments, a wing region differs from a core region in that they have different sugar modifications, base modifications, internucleotidic linkages, internucleotidic linkage stereochemistry, etc. In some embodiments, a wing region differs from a core region in that they have different 2′-modifications of the sugars.

[0646] In some embodiments, an internucleotidic linkage between a wing region and a core region is considered part of the wing region. In some embodiments, an internucleotidic linkage between a 5′-wing region and a core region is considered part of the wing region. In some embodiments, an internucleotidic linkage between a 3′-wing region and a core region is considered part of the wing region. In some embodiments, an internucleotidic linkage between a wing region and a core region is considered part of the core region. In some embodiments, an internucleotidic linkage between a 5′-wing region and a core region is considered part of the core region. In some embodiments, an internucleotidic linkage between a 3′-wing region and a core region is considered part of the core region.

[0647] In some embodiments, an internucleotidic linkage between a wing region and a core region is considered part of the wing region. In some embodiments, an internucleotidic linkage between a 5′-wing region and a core region is considered part of the wing region. In some embodiments, an internucleotidic linkage between a 3′-wing region and a core region is considered part of the wing region. In some embodiments, an internucleotidic linkage between a wing region and a core region is considered part of the core region. In some embodiments, an internucleotidic linkage between a 5′-wing region and a core region is considered part of the core region. In some embodiments, an internucleotidic linkage between a 3′-wing region and a core region is considered part of the core region.

[0648] In some embodiments, a wing region comprises 2 or more nucleosides. In some embodiments, a wing region comprises 3 or more nucleosides. In some embodiments, a wing region comprises 4 or more nucleosides. In some embodiments, a wing region comprises 5 or more nucleosides. In some embodiments, a wing region comprises 6 or more nucleosides. In some embodiments, a wing region comprises 7 or more nucleosides. In some embodiments, a wing region comprises 8 or more nucleosides. In some embodiments, a wing region comprises 9 or more nucleosides. In some embodiments, a wing region comprises 10 or more nucleosides. In some embodiments, a wing region comprises 11 or more nucleosides. In some embodiments, a wing region comprises 12 or more nucleosides. In some embodiments, a wing region comprises 13 or more nucleosides. In some embodiments, a wing region comprises 14 or more nucleosides. In some embodiments, a wing region comprises 15 or more nucleosides.

[0649] In some embodiments, a wing region comprises 2 or more modified internucleotidic linkages. In some embodiments, a wing region comprises 3 or more modified internucleotidic linkages. In some embodiments, a wing region comprises 4 or more modified internucleotidic linkages. In some embodiments, a wing region comprises 5 or more modified internucleotidic linkages. In some embodiments, a wing region comprises 6 or more modified internucleotidic linkages. In some embodiments, a wing region comprises 7 or more modified internucleotidic linkages. In some embodiments, a wing region comprises 8 or more modified internucleotidic linkages. In some embodiments, a wing region comprises 9 or more modified internucleotidic linkages. In some embodiments, a wing region comprises 10 or more modified internucleotidic linkages. In some embodiments, a wing region comprises 11 or more modified internucleotidic linkages. In some embodiments, a wing region comprises 12 or more modified internucleotidic linkages. In some embodiments, a wing region comprises 13 or more modified internucleotidic linkages. In some embodiments, a wing region comprises 14 or more modified internucleotidic linkages. In some embodiments, a wing region comprises 15 or more modified internucleotidic linkages.

[0650] In some embodiments, a chiral internucleotidic linkage or a modified internucleotidic linkage has the structure of formula I. In some embodiments, a chiral internucleotidic linkage or a modified internucleotidic linkage is phosphorothioate. In some embodiments, each chiral internucleotidic linkage or a modified internucleotidic linkage independently has the structure of formula I. In some embodiments, each chiral internucleotidic linkage or a modified internucleotidic linkage is phosphorothioate.

[0651] In some embodiments, a wing region comprises 2 or consecutive modified internucleotidic linkages. In some embodiments, a wing region comprises 3 or consecutive modified internucleotidic linkages. In some embodiments, a wing region comprises 4 or consecutive modified internucleotidic linkages. In some embodiments, a wing region comprises 5 or consecutive modified internucleotidic linkages. In some embodiments, a wing region comprises 6 or consecutive modified internucleotidic linkages. In some embodiments, a wing region comprises 7 or consecutive modified internucleotidic linkages. In some embodiments, a wing region comprises 8 or consecutive modified internucleotidic linkages. In some embodiments, a wing region comprises 9 or consecutive modified internucleotidic linkages. In some embodiments, a wing region comprises 10 or consecutive modified internucleotidic linkages. In some embodiments, a wing region comprises 11 or consecutive modified internucleotidic linkages. In some embodiments, a wing region comprises 12 or consecutive modified internucleotidic linkages. In some embodiments, a wing region comprises 13 or consecutive modified internucleotidic linkages. In some embodiments, a wing region comprises 14 or consecutive modified internucleotidic linkages. In some embodiments, a wing region comprises 15 or consecutive modified internucleotidic linkages. In some embodiments, each internucleotidic linkage in a wing region is independently a modified internucleotidic linkage.

[0652] In some embodiments, 5% or more of the internucleotidic linkages of provided CpG oligonucleotides are modified internucleotidic linkages. In some embodiments, 10% or more of the internucleotidic linkages of provided CpG oligonucleotides are modified internucleotidic linkages. In some embodiments, 15% or more of the internucleotidic linkages of provided CpG oligonucleotides are modified internucleotidic linkages. In some embodiments, 20% or more of the internucleotidic linkages of provided CpG oligonucleotides are modified internucleotidic linkages. In some embodiments, 25% or more of the internucleotidic linkages of provided CpG oligonucleotides are modified internucleotidic linkages. In some embodiments, 30% or more of the internucleotidic linkages of provided CpG oligonucleotides are modified internucleotidic linkages. In some embodiments, 35% or more of the internucleotidic linkages of provided CpG oligonucleotides are modified internucleotidic linkages. In some embodiments, 40% or more of the internucleotidic linkages of provided CpG oligonucleotides are modified internucleotidic linkages. In some embodiments, 45% or more of the internucleotidic linkages of a wing region are modified internucleotidic linkages. In some embodiments, 50% or more of the internucleotidic linkages of a wing region are modified internucleotidic linkages. In some embodiments, 55% or more of the internucleotidic linkages of a wing region are modified internucleotidic linkages. In some embodiments, 60% or more of the internucleotidic linkages of a wing region are modified internucleotidic linkages. In some embodiments, 65% or more of the internucleotidic linkages of a wing region are modified internucleotidic linkages. In some embodiments, 70% or more of the internucleotidic linkages of a wing region are modified internucleotidic linkages. In some embodiments, 75% or more of the internucleotidic linkages of a wing region are modified internucleotidic linkages. In some embodiments, 80% or more of the internucleotidic linkages of a wing region are modified internucleotidic linkages. In some embodiments, 85% or more of the internucleotidic linkages of a wing region are modified internucleotidic linkages. In some embodiments, 90% or more of the internucleotidic linkages of a wing region are modified internucleotidic linkages. In some embodiments, 95% or more of the internucleotidic linkages of a wing region are modified internucleotidic linkages. In some embodiments, each internucleotidic linkage of a wing region is a modified internucleotidic linkage.

[0653] In some embodiments, a wing region comprises 2 or more natural phosphate linkages. In some embodiments, a wing region comprises 3 or more natural phosphate linkages. In some embodiments, a wing region comprises 4 or more natural phosphate linkages. In some embodiments, a wing region comprises 5 or more natural phosphate linkages. In some embodiments, a wing region comprises 6 or more natural phosphate linkages. In some embodiments, a wing region comprises 7 or more natural phosphate linkages. In some embodiments, a wing region comprises 8 or more natural phosphate linkages. In some embodiments, a wing region comprises 9 or more natural phosphate linkages. In some embodiments, a wing region comprises 10 or more natural phosphate linkages. In some embodiments, a wing region comprises 11 or more natural phosphate linkages. In some embodiments, a wing region comprises 12 or more natural phosphate linkages. In some embodiments, a wing region comprises 13 or more natural phosphate linkages. In some embodiments, a wing region comprises 14 or more natural phosphate linkages. In some embodiments, a wing region comprises 15 or more natural phosphate linkages. In some embodiments, a wing region comprises 2 or consecutive natural phosphate linkages. In some embodiments, a wing region comprises 3 or consecutive natural phosphate linkages. In some embodiments, a wing region comprises 4 or consecutive natural phosphate linkages. In some embodiments, a wing region comprises 5 or consecutive natural phosphate linkages. In some embodiments, a wing region comprises 6 or consecutive natural phosphate linkages. In some embodiments, a wing region comprises 7 or consecutive natural phosphate linkages. In some embodiments, a wing region comprises 8 or consecutive natural phosphate linkages. In some embodiments, a wing region comprises 9 or consecutive natural phosphate linkages. In some embodiments, a wing region comprises 10 or consecutive natural phosphate linkages. In some embodiments, a wing region comprises 11 or consecutive natural phosphate linkages. In some embodiments, a wing region comprises 12 or consecutive natural phosphate linkages. In some embodiments, a wing region comprises 13 or consecutive natural phosphate linkages. In some embodiments, a wing region comprises 14 or consecutive natural phosphate linkages. In some embodiments, a wing region comprises 15 or consecutive natural phosphate linkages. In some embodiments, each internucleotidic linkage in a wing region is independently a natural phosphate linkage.

[0654] In some embodiments, 5% or more of the internucleotidic linkages of provided CpG oligonucleotides are natural phosphate linkages. In some embodiments, 10% or more of the internucleotidic linkages of provided CpG oligonucleotides are natural phosphate linkages. In some embodiments, 15% or more of the internucleotidic linkages of provided CpG oligonucleotides are natural phosphate linkages. In some embodiments, 20% or more of the internucleotidic linkages of provided CpG oligonucleotides are natural phosphate linkages. In some embodiments, 25% or more of the internucleotidic linkages of provided CpG oligonucleotides are natural phosphate linkages. In some embodiments, 30% or more of the internucleotidic linkages of provided CpG oligonucleotides are natural phosphate linkages. In some embodiments, 35% or more of the internucleotidic linkages of provided CpG oligonucleotides are natural phosphate linkages. In some embodiments, 40% or more of the internucleotidic linkages of provided CpG oligonucleotides are natural phosphate linkages. In some embodiments, 45% or more of the internucleotidic linkages of a wing region are natural phosphate linkages. In some embodiments, 50% or more of the internucleotidic linkages of a wing region are natural phosphate linkages. In some embodiments, 55% or more of the internucleotidic linkages of a wing region are natural phosphate linkages. In some embodiments, 60% or more of the internucleotidic linkages of a wing region are natural phosphate linkages. In some embodiments, 65% or more of the internucleotidic linkages of a wing region are natural phosphate linkages. In some embodiments, 70% or more of the internucleotidic linkages of a wing region are natural phosphate linkages. In some embodiments, 75% or more of the internucleotidic linkages of a wing region are natural phosphate linkages. In some embodiments, 80% or more of the internucleotidic linkages of a wing region are natural phosphate linkages. In some embodiments, 85% or more of the internucleotidic linkages of a wing region are natural phosphate linkages. In some embodiments, 90% or more of the internucleotidic linkages of a wing region are natural phosphate linkages. In some embodiments, 95% or more of the internucleotidic linkages of a wing region are natural phosphate linkages. In some embodiments, each internucleotidic linkage of a wing region is a natural phosphate linkage.

[0655] In some embodiments, a core region comprises 2 or more modified internucleotidic linkages. In some embodiments, a core region comprises 3 or more modified internucleotidic linkages. In some embodiments, a core region comprises 4 or more modified internucleotidic linkages. In some embodiments, a core region comprises 5 or more modified internucleotidic linkages. In some embodiments, a core region comprises 6 or more modified internucleotidic linkages. In some embodiments, a core region comprises 7 or more modified internucleotidic linkages. In some embodiments, a core region comprises 8 or more modified internucleotidic linkages. In some embodiments, a core region comprises 9 or more modified internucleotidic linkages. In some embodiments, a core region comprises 10 or more modified internucleotidic linkages. In some embodiments, a core region comprises 11 or more modified internucleotidic linkages. In some embodiments, a core region comprises 12 or more modified internucleotidic linkages. In some embodiments, a core region comprises 13 or more modified internucleotidic linkages. In some embodiments, a core region comprises 14 or more modified internucleotidic linkages. In some embodiments, a core region comprises 15 or more modified internucleotidic linkages. In some embodiments, a core region comprises 2 or consecutive modified internucleotidic linkages. In some embodiments, a core region comprises 3 or consecutive modified internucleotidic linkages. In some embodiments, a core region comprises 4 or consecutive modified internucleotidic linkages. In some embodiments, a core region comprises 5 or consecutive modified internucleotidic linkages. In some embodiments, a core region comprises 6 or consecutive modified internucleotidic linkages. In some embodiments, a core region comprises 7 or consecutive modified internucleotidic linkages. In some embodiments, a core region comprises 8 or consecutive modified internucleotidic linkages. In some embodiments, a core region comprises 9 or consecutive modified internucleotidic linkages. In some embodiments, a core region comprises 10 or consecutive modified internucleotidic linkages. In some embodiments, a core region comprises 11 or consecutive modified internucleotidic linkages. In some embodiments, a core region comprises 12 or consecutive modified internucleotidic linkages. In some embodiments, a core region comprises 13 or consecutive modified internucleotidic linkages. In some embodiments, a core region comprises 14 or consecutive modified internucleotidic linkages. In some embodiments, a core region comprises 15 or consecutive modified internucleotidic linkages. In some embodiments, each internucleotidic linkage in a core region is independently a modified internucleotidic linkage.

[0656] In some embodiments, 5% or more of the internucleotidic linkages of provided CpG oligonucleotides are modified internucleotidic linkages. In some embodiments, 10% or more of the internucleotidic linkages of provided CpG oligonucleotides are modified internucleotidic linkages. In some embodiments, 15% or more of the internucleotidic linkages of provided CpG oligonucleotides are modified internucleotidic linkages. In some embodiments, 20% or more of the internucleotidic linkages of provided CpG oligonucleotides are modified internucleotidic linkages. In some embodiments, 25% or more of the internucleotidic linkages of provided CpG oligonucleotides are modified internucleotidic linkages. In some embodiments, 30% or more of the internucleotidic linkages of provided CpG oligonucleotides are modified internucleotidic linkages. In some embodiments, 35% or more of the internucleotidic linkages of provided CpG oligonucleotides are modified internucleotidic linkages. In some embodiments, 40% or more of the internucleotidic linkages of provided CpG oligonucleotides are modified internucleotidic linkages. In some embodiments, 45% or more of the internucleotidic linkages of a core region are modified internucleotidic linkages. In some embodiments, 50% or more of the internucleotidic linkages of a core region are modified internucleotidic linkages. In some embodiments, 55% or more of the internucleotidic linkages of a core region are modified internucleotidic linkages. In some embodiments, 60% or more of the internucleotidic linkages of a core region are modified internucleotidic linkages. In some embodiments, 65% or more of the internucleotidic linkages of a core region are modified internucleotidic linkages. In some embodiments, 70% or more of the internucleotidic linkages of a core region are modified internucleotidic linkages. In some embodiments, 75% or more of the internucleotidic linkages of a core region are modified internucleotidic linkages. In some embodiments, 80% or more of the internucleotidic linkages of a core region are modified internucleotidic linkages. In some embodiments, 85% or more of the internucleotidic linkages of a core region are modified internucleotidic linkages. In some embodiments, 90% or more of the internucleotidic linkages of a core region are modified internucleotidic linkages. In some embodiments, 95% or more of the internucleotidic linkages of a core region are modified internucleotidic linkages. In some embodiments, each internucleotidic linkage of a core region is a modified internucleotidic linkage.

[0657] Provided CpG oligonucleotides can comprise various number of modified internucleotidic linkages. In some embodiments, provided CpG oligonucleotides comprise one modified internucleotidic linkage. In some embodiments, provided CpG oligonucleotides comprise 2 or more modified internucleotidic linkages. In some embodiments, provided CpG oligonucleotides comprise 3 or more modified internucleotidic linkages. In some embodiments, provided CpG oligonucleotides comprise 4 or more modified internucleotidic linkages. In some embodiments, provided CpG oligonucleotides comprise 5 or more modified internucleotidic linkages. In some embodiments, provided CpG oligonucleotides comprise 6 or more modified internucleotidic linkages. In some embodiments, provided CpG oligonucleotides comprise 7 or more modified internucleotidic linkages. In some embodiments, provided CpG oligonucleotides comprise 8 or more modified internucleotidic linkages. In some embodiments, provided CpG oligonucleotides comprise 9 or more modified internucleotidic linkages. In some embodiments, provided CpG oligonucleotides comprise 10 or more modified internucleotidic linkages. In some embodiments, provided CpG oligonucleotides comprise 15 or more modified internucleotidic linkages. In some embodiments, provided CpG oligonucleotides comprise 20 or more modified internucleotidic linkages. In some embodiments, provided CpG oligonucleotides comprise 25 or more modified internucleotidic linkages. In some embodiments, provided CpG oligonucleotides comprise 30 or more modified internucleotidic linkages.

[0658] In some embodiments, 5% or more of the internucleotidic linkages of provided CpG oligonucleotides are modified internucleotidic linkages. In some embodiments, 10% or more of the internucleotidic linkages of provided CpG oligonucleotides are modified internucleotidic linkages. In some embodiments, 15% or more of the internucleotidic linkages of provided CpG oligonucleotides are modified internucleotidic linkages. In some embodiments, 20% or more of the internucleotidic linkages of provided CpG oligonucleotides are modified internucleotidic linkages. In some embodiments, 25% or more of the internucleotidic linkages of provided CpG oligonucleotides are modified internucleotidic linkages. In some embodiments, 30% or more of the internucleotidic linkages of provided CpG oligonucleotides are modified internucleotidic linkages. In some embodiments, 35% or more of the internucleotidic linkages of provided CpG oligonucleotides are modified internucleotidic linkages. In some embodiments, 40% or more of the internucleotidic linkages of provided CpG oligonucleotides are modified internucleotidic linkages. In some embodiments, 45% or more of the internucleotidic linkages of provided CpG oligonucleotides are modified internucleotidic linkages. In some embodiments, 50% or more of the internucleotidic linkages of provided CpG oligonucleotides are modified internucleotidic linkages. In some embodiments, 55% or more of the internucleotidic linkages of provided CpG oligonucleotides are modified internucleotidic linkages. In some embodiments, 60% or more of the internucleotidic linkages of provided CpG oligonucleotides are modified internucleotidic linkages. In some embodiments, 65% or more of the internucleotidic linkages of provided CpG oligonucleotides are modified internucleotidic linkages. In some embodiments, 70% or more of the internucleotidic linkages of provided CpG oligonucleotides are modified internucleotidic linkages. In some embodiments, 75% or more of the internucleotidic linkages of provided CpG oligonucleotides are modified internucleotidic linkages. In some embodiments, 80% or more of the internucleotidic linkages of provided CpG oligonucleotides are modified internucleotidic linkages. In some embodiments, 85% or more of the internucleotidic linkages of provided CpG oligonucleotides are modified internucleotidic linkages. In some embodiments, 90% or more of the internucleotidic linkages of provided CpG oligonucleotides are modified internucleotidic linkages. In some embodiments, 95% or more of the internucleotidic linkages of provided CpG oligonucleotides are modified internucleotidic linkages. In some embodiments, each internucleotidic linkage of provided CpG oligonucleotides is a modified internucleotidic linkage.

[0659] As understood by a person having ordinary skill in the art, a stereorandom or racemic preparation of CpG oligonucleotides is prepared by non-stereoselective and/or low-stereoselective coupling of nucleotide monomers, typically without using any chiral auxiliaries, chiral modification reagents, and/or chiral catalysts. In some embodiments, in a substantially racemic (or chirally uncontrolled) preparation of CpG oligonucleotides, all or most coupling steps are not chirally controlled in that the coupling steps are not specifically conducted to provide enhanced stereoselectivity. An example substantially racemic preparation of CpG oligonucleotides is the preparation of phosphorothioate CpG oligonucleotides through sulfurizing phosphite triesters from commonly used phosphoramidite oligonucleotide synthesis with either tetraethylthiuram disulfide or (TETD) or 3H-1, 2-bensodithiol-3-one 1, 1-dioxide (BDTD), a well-known process in the art. In some embodiments, substantially racemic preparation of CpG oligonucleotides provides substantially racemic oligonucleotide compositions (or chirally uncontrolled CpG oligonucleotide compositions). In some embodiments, at least one coupling of a nucleotide monomer has a diastereoselectivity lower than about 60:40, 70:30, 80:20, 85:15, 90:10, 91:9, 92:8, 97:3, 98:2, or 99:1. In some embodiments, at least two couplings of a nucleotide monomer have a diastereoselectivity lower than about 60:40, 70:30, 80:20, 85:15, 90:10, 91:9, 92:8, 97:3, 98:2, or 99:1. In some embodiments, at least three couplings of a nucleotide monomer have a diastereoselectivity lower than about 60:40, 70:30, 80:20, 85:15, 90:10, 91:9, 92:8, 97:3, 98:2, or 99:1. In some embodiments, at least four couplings of a nucleotide monomer have a diastereoselectivity lower than about 60:40, 70:30, 80:20, 85:15, 90:10, 91:9, 92:8, 97:3, 98:2, or 99:1. In some embodiments, at least five couplings of a nucleotide monomer have a diastereoselectivity lower than about 60:40, 70:30, 80:20, 85:15, 90:10, 91:9, 92:8, 97:3, 98:2, or 99:1. In some embodiments, each coupling of a nucleotide monomer independently has a diastereoselectivity lower than about 60:40, 70:30, 80:20, 85:15, 90:10, 91:9, 92:8, 97:3, 98:2, or 99:1. In some embodiments, at least two internucleotidic linkages have a diastereoselectivity lower than about 60:40, 70:30, 80:20, 85:15, 90:10, 91:9, 92:8, 97:3, 98:2, or 99:1. In some embodiments, at least three internucleotidic linkages have a diastereoselectivity lower than about 60:40, 70:30, 80:20, 85:15, 90:10, 91:9, 92:8, 97:3, 98:2, or 99:1. In some embodiments, at least four internucleotidic linkages have a diastereoselectivity lower than about 60:40, 70:30, 80:20, 85:15, 90:10, 91:9, 92:8, 97:3, 98:2, or 99:1. In some embodiments, at least five internucleotidic linkages have a diastereoselectivity lower than about 60:40, 70:30, 80:20, 85:15, 90:10, 91:9, 92:8, 97:3, 98:2, or 99:1. In some embodiments, each internucleotidic linkage independently has a diastereoselectivity lower than about 60:40, 70:30, 80:20, 85:15, 90:10, 91:9, 92:8, 97:3, 98:2, or 99:1. In some embodiments, a diastereoselectivity is lower than about 60:40. In some embodiments, a diastereoselectivity is lower than about 70:30. In some embodiments, a diastereoselectivity is lower than about 80:20. In some embodiments, a diastereoselectivity is lower than about 90:10. In some embodiments, a diastereoselectivity is lower than about 91:9. In some embodiments, a diastereoselectivity is lower than about 92:8. In some embodiments, a diastereoselectivity is lower than about 93:7. In some embodiments, a diastereoselectivity is lower than about 94:6. In some embodiments, a diastereoselectivity is lower than about 95:5. In some embodiments, a diastereoselectivity is lower than about 96:4. In some embodiments, a diastereoselectivity is lower than about 97:3. In some embodiments, a diastereoselectivity is lower than about 98:2. In some embodiments, a diastereoselectivity is lower than about 99:1. In some embodiments, at least one coupling has a diastereoselectivity lower than about 90:10. In some embodiments, at least two couplings have a diastereoselectivity lower than about 90:10. In some embodiments, at least three couplings have a diastereoselectivity lower than about 90:10. In some embodiments, at least four couplings have a diastereoselectivity lower than about 90:10. In some embodiments, at least five couplings have a diastereoselectivity lower than about 90:10. In some embodiments, each coupling independently has a diastereoselectivity lower than about 90:10. In some embodiments, at least one internucleotidic linkage has a diastereoselectivity lower than about 90:10. In some embodiments, at least two internucleotidic linkages have a diastereoselectivity lower than about 90:10. In some embodiments, at least three internucleotidic linkages have a diastereoselectivity lower than about 90:10. In some embodiments, at least four internucleotidic linkages have a diastereoselectivity lower than about 90:10. In some embodiments, at least five internucleotidic linkages have a diastereoselectivity lower than about 90:10. In some embodiments, each internucleotidic linkage independently has a diastereoselectivity lower than about 90:10. In some embodiments, a diastereoselectivity corresponding to an internucleotidic linkage is utilized as diastereopurity of the internucleotidic linkage.

[0660] As understood by a person having ordinary skill in the art, in some embodiments, diastereoselectivity of a coupling or a linkage can be assessed through the diastereoselectivity of a dimer formation under the same or comparable conditions, wherein the dimer has the same 5′- and 3′-nucleosides and internucleotidic linkage. For example, diastereoselectivity of the underlined coupling or linkage in NNNNNNNG*SGNNNNNNN can be assessed from coupling two G moieties under the same or comparable conditions, e.g., monomers, chiral auxiliaries, solvents, activators, temperatures, etc.

[0661] In some embodiments, a plurality of oligonucleotides, e.g., provided oligonucleotides comprising CpG and/or lipid moieties, share the same stereochemistry at one or more chiral internucleotidic linkages (chirally controlled internucleotidic linkages). In some embodiments, they share the same stereochemistry at two or more chiral internucleotidic linkages. In some embodiments, they share the same stereochemistry at three or more chiral internucleotidic linkages. In some embodiments, they share the same stereochemistry at four or more chiral internucleotidic linkages. In some embodiments, they share the same stereochemistry at five or more chiral internucleotidic linkages. In some embodiments, they share the same stereochemistry at six or more chiral internucleotidic linkages. In some embodiments, they share the same stereochemistry at seven or more chiral internucleotidic linkages. In some embodiments, they share the same stereochemistry at eight or more chiral internucleotidic linkages. In some embodiments, they share the same stereochemistry at nine or more chiral internucleotidic linkages. In some embodiments, they share the same stereochemistry at ten or more chiral internucleotidic linkages. In some embodiments, they share the same stereochemistry at 11 or more chiral internucleotidic linkages. In some embodiments, they share the same stereochemistry at 12 or more chiral internucleotidic linkages. In some embodiments, they share the same stereochemistry at 13 or more chiral internucleotidic linkages. In some embodiments, they share the same stereochemistry at 14 or more chiral internucleotidic linkages. In some embodiments, they share the same stereochemistry at 15 or more chiral internucleotidic linkages. In some embodiments, they share the same stereochemistry at 10% or more of the chiral internucleotidic linkages. In some embodiments, they share the same stereochemistry at 20% or more of the chiral internucleotidic linkages. In some embodiments, they share the same stereochemistry at 30% or more of the chiral internucleotidic linkages. In some embodiments, they share the same stereochemistry at 40% or more of the chiral internucleotidic linkages. In some embodiments, they share the same stereochemistry at 50% or more of the chiral internucleotidic linkages. In some embodiments, they share the same stereochemistry at 60% or more of the chiral internucleotidic linkages. In some embodiments, they share the same stereochemistry at 70% or more of the chiral internucleotidic linkages. In some embodiments, they share the same stereochemistry at 80% or more of the chiral internucleotidic linkages. In some embodiments, they share the same stereochemistry at 90% or more of the chiral internucleotidic linkages. In some embodiments, they share the same stereochemistry at 95% or more of the chiral internucleotidic linkages. In some embodiments, they share the same stereochemistry at 96% or more of the chiral internucleotidic linkages. In some embodiments, they share the same stereochemistry at 97% or more of the chiral internucleotidic linkages. In some embodiments, they share the same stereochemistry at 98% or more of the chiral internucleotidic linkages. In some embodiments, they share the same stereochemistry at each of the chiral internucleotidic linkages. As readily appreciated by a person having ordinary skill in the art and illustrated the examples, chiral internucleotidic linkages where a plurality of oligonucleotides share the same stereochemistry can independently be either Rp or Sp, e.g., at a first chiral internucleotidic linkage a plurality of oligonucleotides are all Rp while at a second position they are all Sp (RpSp; can also be RpRp, SpSp, or SpRp as desired).

[0662] In some embodiments, at least 1%, 2%, 3%, 4%, 5%, 6%, 7%, 8%, 9%, 10%, 15%, 20%, 25%, 30%, 35%, 40%, 45%, 50%, 55%, 60%, 65%, 70%, 75%, 80%, 85%, 90%, 91%, 92%, 93%, 94%, 95%, 96%, 97%, 98% or 99% of oligonucleotides in a provided composition that share the common base sequence, the common pattern of backbone linkages; and the common pattern of backbone phosphorus modifications share the same stereochemistry at the one or more chiral internucleotidic linkages. In some embodiments, the percentage is at least 0.5%. In some embodiments, the percentage is at least 1%. In some embodiments, the percentage is at least 2%. In some embodiments, the percentage is at least 3%. In some embodiments, the percentage is at least 4%. In some embodiments, the percentage is at least 5%. In some embodiments, the percentage is at least 6%. In some embodiments, the percentage is at least 7%. In some embodiments, the percentage is at least 8%. In some embodiments, the percentage is at least 9%. In some embodiments, the percentage is at least 10%. In some embodiments, the percentage is at least 20%. In some embodiments, the percentage is at least 30%. In some embodiments, the percentage is at least 40%. In some embodiments, the percentage is at least 50%. In some embodiments, the percentage is at least 60%. In some embodiments, the percentage is at least 70%. In some embodiments, the percentage is at least 75%. In some embodiments, the percentage is at least 80%. In some embodiments, the percentage is at least 81%. In some embodiments, the percentage is at least 82%. In some embodiments, the percentage is at least 83%. In some embodiments, the percentage is at least 84%. In some embodiments, the percentage is at least 85%. In some embodiments, the percentage is at least 86%. In some embodiments, the percentage is at least 87%. In some embodiments, the percentage is at least 88%. In some embodiments, the percentage is at least 89%. In some embodiments, the percentage is at least 90%. In some embodiments, the percentage is at least 91%. In some embodiments, the percentage is at least 92%. In some embodiments, the percentage is at least 93%. In some embodiments, the percentage is at least 94%. In some embodiments, the percentage is at least 95%. In some embodiments, the percentage is at least 96%. In some embodiments, the percentage is at least 97%. In some embodiments, the percentage is at least 98%. In some embodiments, the percentage is at least 99%.

[0663] In some embodiments, oligonucleotides that share the common base sequence, the common pattern of backbone linkages, the common pattern of backbone phosphorus modifications and the same stereochemistry at the one or more chiral internucleotidic linkages are enriched, for example, relative to oligonucleotides that share the common base sequence, the common pattern of backbone linkages, the common pattern of backbone phosphorus modifications but not the same stereochemistry at the one or more chiral internucleotidic linkages. In some embodiments, as understood by a person having ordinary skill in the art, the enrichment is from the use of one or more provided technologies that enable stereoselective (chirally controlled) formation of each of the internucleotidic linkages where the oligonucleotides share the same stereochemistry.

[0664] In some embodiments, oligonucleotides that share the common base sequence, the common pattern of backbone linkages, the common pattern of backbone phosphorus modifications and the same stereochemistry at the one or more chiral internucleotidic linkages are enriched at least 5 fold (such oligonucleotides have a fraction of 5*(½ⁿ) of oligonucleotides that share the common base sequence, the common pattern of backbone linkages, and the common pattern of backbone phosphorus modifications, wherein n is the number of internucleotidic linkages where such oligonucleotides share the same stereochemistry; or oligonucleotides that share the common base sequence, the common pattern of backbone linkages, the common pattern of backbone phosphorus modifications but not the same stereochemistry at the one or more chiral internucleotidic linkages are no more than [1-(½ⁿ)]/5 of oligonucleotides that share the common base sequence, the common pattern of backbone linkages, and the common pattern of backbone phosphorus modifications) compared to a stereorandom preparation of the oligonucleotides wherein none of the internucleotidic linkages are chirally controlled (oligonucleotides that share the common base sequence, the common pattern of backbone linkages, the common pattern of backbone phosphorus modifications, and the same stereochemistry at the one or more chiral internucleotidic linkages are typically considered to have a fraction of ½ⁿ of oligonucleotides that share the common base sequence, the common pattern of backbone linkages, and the common pattern of backbone phosphorus modifications, wherein n is the number of chiral internucleotidic linkages wherein the oligonucleotides share the same stereochemistry, and oligonucleotides that share the common base sequence, the common pattern of backbone linkages, the common pattern of backbone phosphorus modifications but are not of the particular oligonucleotide type are typically considered to have a fraction of [1-(½ⁿ)] of oligonucleotides that share the common base sequence, the common pattern of backbone linkages, and the common pattern of backbone phosphorus modifications). In some embodiments, the enrichment is at least 20 fold. In some embodiments, the enrichment is at least 30 fold. In some embodiments, the enrichment is at least 40 fold. In some embodiments, the enrichment is at least 50 fold. In some embodiments, the enrichment is at least 60 fold. In some embodiments, the enrichment is at least 70 fold. In some embodiments, the enrichment is at least 80 fold. In some embodiments, the enrichment is at least 90 fold. In some embodiments, the enrichment is at least 100 fold. In some embodiments, the enrichment is at least 200 fold. In some embodiments, the enrichment is at least 300 fold. In some embodiments, the enrichment is at least 400 fold. In some embodiments, the enrichment is at least 500 fold. In some embodiments, the enrichment is at least 600 fold. In some embodiments, the enrichment is at least 700 fold. In some embodiments, the enrichment is at least 800 fold. In some embodiments, the enrichment is at least 900 fold. In some embodiments, the enrichment is at least 1,000 fold. In some embodiments, the enrichment is at least 2,000 fold. In some embodiments, the enrichment is at least 4,000 fold. In some embodiments, the enrichment is at least 8,000 fold. In some embodiments, the enrichment is at least 10,000 fold. In some embodiments, the enrichment is at least 20,000 fold. In some embodiments, the enrichment is at least (1.5)ⁿ. In some embodiments, the enrichment is at least (1.6)ⁿ. In some embodiments, the enrichment is at least (1.7)ⁿ. In some embodiments, the enrichment is at least (1.1)ⁿ. In some embodiments, the enrichment is at least (1.8)ⁿ. In some embodiments, the enrichment is at least (1.9)ⁿ. In some embodiments, the enrichment is at least 2ⁿ. In some embodiments, the enrichment is at least 3ⁿ. In some embodiments, the enrichment is at least 4ⁿ. In some embodiments, the enrichment is at least 5ⁿ. In some embodiments, the enrichment is at least 6ⁿ. In some embodiments, the enrichment is at least 7ⁿ. In some embodiments, the enrichment is at least 8ⁿ. In some embodiments, the enrichment is at least 9ⁿ. In some embodiments, the enrichment is at least 10ⁿ. In some embodiments, the enrichment is at least 15ⁿ. In some embodiments, the enrichment is at least 20ⁿ. In some embodiments, the enrichment is at least 25ⁿ. In some embodiments, the enrichment is at least 30ⁿ. In some embodiments, the enrichment is at least 40ⁿ. In some embodiments, the enrichment is at least 50ⁿ. In some embodiments, the enrichment is at least 100ⁿ. In some embodiments, enrichment is measured by increase of the fraction of oligonucleotides that share the common base sequence, the common pattern of backbone linkages, the common pattern of backbone phosphorus modifications and the same stereochemistry at the one or more chiral internucleotidic linkages. In some embodiments, an enrichment is measured by decrease of the fraction of oligonucleotides that share the common base sequence, the common pattern of backbone linkages, the common pattern of backbone phosphorus modifications but not the same stereochemistry at the one or more chiral internucleotidic linkages.

[0665] In some embodiments, oligonucleotides of a particular type in a chirally controlled oligonucleotide composition are structurally identical (including stereochemically) and are enriched at least 5 fold (oligonucleotides of the particular type have a fraction of 5*(½ⁿ) of oligonucleotides that have the base sequence, the pattern of backbone linkages, and the pattern of backbone phosphorus modifications of the particular oligonucleotide type, wherein n is the number of chiral internucleotidic linkages; or oligonucleotides that have the base sequence, the pattern of backbone linkages, and the pattern of backbone phosphorus modifications of the particular oligonucleotide type but are not of the particular oligonucleotide type are no more than [1-(½ⁿ)]/5 of oligonucleotides that have the base sequence, the pattern of backbone linkages, and the pattern of backbone phosphorus modifications of the particular oligonucleotide type) compared to a stereorandom preparation of the oligonucleotides (oligonucleotides of the particular type are typically considered to have a fraction of ½ⁿ of oligonucleotides that have the base sequence, the pattern of backbone linkages, and the pattern of backbone phosphorus modifications of the particular oligonucleotide type, wherein n is the number of chiral internucleotidic linkages, and oligonucleotides that have the base sequence, the pattern of backbone linkages, and the pattern of backbone phosphorus modifications of the particular oligonucleotide type but are not of the particular oligonucleotide type are typically considered to have a fraction of [1-(½ⁿ)] of oligonucleotides that have the base sequence, the pattern of backbone linkages, and the pattern of backbone phosphorus modifications of the particular oligonucleotide type). In some embodiments, the enrichment is at least 20 fold. In some embodiments, the enrichment is at least 30 fold. In some embodiments, the enrichment is at least 40 fold. In some embodiments, the enrichment is at least 50 fold. In some embodiments, the enrichment is at least 60 fold. In some embodiments, the enrichment is at least 70 fold. In some embodiments, the enrichment is at least 80 fold. In some embodiments, the enrichment is at least 90 fold. In some embodiments, the enrichment is at least 100 fold. In some embodiments, the enrichment is at least 200 fold. In some embodiments, the enrichment is at least 300 fold. In some embodiments, the enrichment is at least 400 fold. In some embodiments, the enrichment is at least 500 fold. In some embodiments, the enrichment is at least 600 fold. In some embodiments, the enrichment is at least 700 fold. In some embodiments, the enrichment is at least 800 fold. In some embodiments, the enrichment is at least 900 fold. In some embodiments, the enrichment is at least 1,000 fold. In some embodiments, the enrichment is at least 2,000 fold. In some embodiments, the enrichment is at least 4,000 fold. In some embodiments, the enrichment is at least 8,000 fold. In some embodiments, the enrichment is at least 10,000 fold. In some embodiments, the enrichment is at least 20,000 fold. In some embodiments, the enrichment is at least (1.5)ⁿ. In some embodiments, the enrichment is at least (1.6)ⁿ. In some embodiments, the enrichment is at least (1.7)ⁿ. In some embodiments, the enrichment is at least (1.1)ⁿ. In some embodiments, the enrichment is at least (1.8)ⁿ. In some embodiments, the enrichment is at least (1.9)ⁿ. In some embodiments, the enrichment is at least 2ⁿ. In some embodiments, the enrichment is at least 3ⁿ. In some embodiments, the enrichment is at least 4ⁿ. In some embodiments, the enrichment is at least 5ⁿ. In some embodiments, the enrichment is at least 6ⁿ. In some embodiments, the enrichment is at least 7ⁿ. In some embodiments, the enrichment is at least 8ⁿ. In some embodiments, the enrichment is at least 9ⁿ. In some embodiments, the enrichment is at least 10ⁿ. In some embodiments, the enrichment is at least 15ⁿ. In some embodiments, the enrichment is at least 20ⁿ. In some embodiments, the enrichment is at least 25ⁿ. In some embodiments, the enrichment is at least 30ⁿ. In some embodiments, the enrichment is at least 40ⁿ. In some embodiments, the enrichment is at least 50ⁿ. In some embodiments, the enrichment is at least 100ⁿ. In some embodiments, enrichment is measured by increase of the fraction of oligonucleotides of the particular oligonucleotide type in oligonucleotides that have the base sequence, the pattern of backbone linkages, and the pattern of backbone phosphorus modifications of the particular oligonucleotide type. In some embodiments, an enrichment is measured by decrease of the fraction of oligonucleotides that have the base sequence, the pattern of backbone linkages, and the pattern of backbone phosphorus modifications of the particular oligonucleotide type but are not of the particular oligonucleotide type in oligonucleotides that have the base sequence, the pattern of backbone linkages, and the pattern of backbone phosphorus modifications of the particular oligonucleotide type.

[0666] In some embodiments, CpG oligonucleotides having a common base sequence and length, a common pattern of backbone linkages, and a common pattern of backbone chiral centers have a common pattern of backbone phosphorus modifications and a common pattern of base modifications. In some embodiments, CpG oligonucleotides having a common base sequence and length, a common pattern of backbone linkages, and a common pattern of backbone chiral centers have a common pattern of backbone phosphorus modifications and a common pattern of nucleoside modifications. In some embodiments, CpG oligonucleotides having a common base sequence and length, a common pattern of backbone linkages, and a common pattern of backbone chiral centers have identical structures.

[0667] In some embodiments, CpG oligonucleotides of a CpG oligonucleotide type have a common pattern of backbone phosphorus modifications and a common pattern of sugar modifications. In some embodiments, CpG oligonucleotides of a CpG oligonucleotide type have a common pattern of backbone phosphorus modifications and a common pattern of base modifications. In some embodiments, CpG oligonucleotides of a CpG oligonucleotide type have a common pattern of backbone phosphorus modifications and a common pattern of nucleoside modifications. In some embodiments, CpG oligonucleotides of a CpG oligonucleotide type are identical.

[0668] In some embodiments, a chirally controlled CpG oligonucleotide composition is a substantially pure preparation of a CpG oligonucleotide type in that CpG oligonucleotides in the composition that are not of the CpG oligonucleotide type are impurities form the preparation process of said CpG oligonucleotide type, in some case, after certain purification procedures.

[0669] In some embodiments, at least about 20% of the CpG oligonucleotides in the composition have a common base sequence and length, a common pattern of backbone linkages, and a common pattern of backbone chiral centers. In some embodiments, at least about 25% of the CpG oligonucleotides in the composition have a common base sequence and length, a common pattern of backbone linkages, and a common pattern of backbone chiral centers. In some embodiments, at least about 30% of the CpG oligonucleotides in the composition have a common base sequence and length, a common pattern of backbone linkages, and a common pattern of backbone chiral centers. In some embodiments, at least about 35% of the CpG oligonucleotides in the composition have a common base sequence and length, a common pattern of backbone linkages, and a common pattern of backbone chiral centers. In some embodiments, at least about 40% of the CpG oligonucleotides in the composition have a common base sequence and length, a common pattern of backbone linkages, and a common pattern of backbone chiral centers. In some embodiments, at least about 45% of the CpG oligonucleotides in the composition have a common base sequence and length, a common pattern of backbone linkages, and a common pattern of backbone chiral centers. In some embodiments, at least about 50% of the CpG oligonucleotides in the chirally controlled oligonucleotide composition have a common base sequence and length, a common pattern of backbone linkages, and a common pattern of backbone chiral centers. In some embodiments, at least about 55% of the CpG oligonucleotides in the chirally controlled oligonucleotide composition have a common base sequence and length, a common pattern of backbone linkages, and a common pattern of backbone chiral centers. In some embodiments, at least about 60% of the CpG oligonucleotides in the chirally controlled oligonucleotide composition have a common base sequence and length, a common pattern of backbone linkages, and a common pattern of backbone chiral centers. In some embodiments, at least about 65% of the CpG oligonucleotides in the chirally controlled oligonucleotide composition have a common base sequence and length, a common pattern of backbone linkages, and a common pattern of backbone chiral centers. In some embodiments, at least about 70% of the CpG oligonucleotides in the chirally controlled oligonucleotide composition have a common base sequence and length, a common pattern of backbone linkages, and a common pattern of backbone chiral centers. In some embodiments, at least about 75% of the CpG oligonucleotides in the chirally controlled oligonucleotide composition have a common base sequence and length, a common pattern of backbone linkages, and a common pattern of backbone chiral centers. In some embodiments, at least about 80% of the CpG oligonucleotides in the chirally controlled oligonucleotide composition have a common base sequence and length, a common pattern of backbone linkages, and a common pattern of backbone chiral centers. In some embodiments, at least about 85% of the CpG oligonucleotides in the chirally controlled oligonucleotide composition have a common base sequence and length, a common pattern of backbone linkages, and a common pattern of backbone chiral centers. In some embodiments, at least about 90% of the CpG oligonucleotides in the chirally controlled oligonucleotide composition have a common base sequence and length, a common pattern of backbone linkages, and a common pattern of backbone chiral centers. In some embodiments, at least about 92% of the CpG oligonucleotides in the chirally controlled oligonucleotide composition have a common base sequence and length, a common pattern of backbone linkages, and a common pattern of backbone chiral centers. In some embodiments, at least about 94% of the CpG oligonucleotides in the chirally controlled oligonucleotide composition have a common base sequence and length, a common pattern of backbone linkages, and a common pattern of backbone chiral centers. In some embodiments, at least about 95% of the CpG oligonucleotides in the chirally controlled oligonucleotide composition have a common base sequence and length, a common pattern of backbone linkages, and a common pattern of backbone chiral centers. In some embodiments, at least about 91%, 92%, 93%, 94%, 95%, 96%, 97%, 98%, or 99% of the CpG oligonucleotides in the chirally controlled oligonucleotide composition have a common base sequence and length, a common pattern of backbone linkages, and a common pattern of backbone chiral centers. In some embodiments, greater than about 99% of the CpG oligonucleotides in the chirally controlled oligonucleotide composition have a common base sequence and length, a common pattern of backbone linkages, and a common pattern of backbone chiral centers. In some embodiments, purity of a chirally controlled CpG oligonucleotide composition of a CpG oligonucleotide can be expressed as the percentage of CpG oligonucleotides in the composition that have a common base sequence and length, a common pattern of backbone linkages, and a common pattern of backbone chiral centers.

[0670] In some embodiments, CpG oligonucleotides having a common base sequence and length, a common pattern of backbone linkages, and a common pattern of backbone chiral centers have a common pattern of backbone phosphorus modifications. In some embodiments, CpG oligonucleotides having a common base sequence and length, a common pattern of backbone linkages, and a common pattern of backbone chiral centers have a common pattern of backbone phosphorus modifications and a common pattern of nucleoside modifications. In some embodiments, CpG oligonucleotides having a common base sequence and length, a common pattern of backbone linkages, and a common pattern of backbone chiral centers have a common pattern of backbone phosphorus modifications and a common pattern of sugar modifications. In some embodiments, CpG oligonucleotides having a common base sequence and length, a common pattern of backbone linkages, and a common pattern of backbone chiral centers have a common pattern of backbone phosphorus modifications and a common pattern of base modifications. In some embodiments, CpG oligonucleotides having a common base sequence and length, a common pattern of backbone linkages, and a common pattern of backbone chiral centers have a common pattern of backbone phosphorus modifications and a common pattern of nucleoside modifications. In some embodiments, CpG oligonucleotides having a common base sequence and length, a common pattern of backbone linkages, and a common pattern of backbone chiral centers are identical.

[0671] In some embodiments, CpG oligonucleotides in provided compositions have a common pattern of backbone phosphorus modifications. In some embodiments, a common base sequence is a base sequence of a CpG oligonucleotide type.

[0672] As noted above and understood in the art, in some embodiments, base sequence of a CpG oligonucleotide can refer to the identity and/or modification status of nucleoside residues (e.g., of sugar and/or base components, relative to standard naturally occurring nucleotides such as adenine, cytosine, guanosine, thymine, and uracil) in the CpG oligonucleotide and/or to the hybridization character (i.e., the ability to hybridize with particular complementary residues) of such residues.

[0673] In some embodiments, a particular CpG oligonucleotide type can be defined by
[0674] 1A) base identity;
[0675] 1B) pattern of base modification;
[0676] 1C) pattern of sugar modification;
[0677] 2) pattern of backbone linkages;
[0678] 3) pattern of backbone chiral centers; and
[0679] 4) pattern of backbone phosphorus modifications.
   Thus, in some embodiments, CpG oligonucleotides of a particular type can share identical bases but differ in their pattern of base modifications and/or sugar modifications. In some embodiments, CpG oligonucleotides of a particular type can share identical bases and pattern of base modifications (including, e.g., absence of base modification), but differ in pattern of sugar modifications.

[0680] In some embodiments, CpG oligonucleotides of a particular type are identical in that they have the same base sequence (including length), the same pattern of chemical modifications to sugar and base moieties, the same pattern of backbone linkages (e.g., pattern of natural phosphate linkages, phosphorothioate linkages, phosphorothioate triester linkages, and combinations thereof), the same pattern of backbone chiral centers (e.g., pattern of stereochemistry (Rp/Sp) of chiral internucleotidic linkages), and the same pattern of backbone phosphorus modifications (e.g., pattern of modifications on the internucleotidic phosphorus atom, such as —S⁻, and -L-R¹ of formula I).

[0681] In some embodiments, purity of a chirally controlled CpG oligonucleotide composition of a CpG oligonucleotide type is expressed as the percentage of CpG oligonucleotides in the composition that are of the CpG oligonucleotide type. In some embodiments, at least about 10% of the CpG oligonucleotides in a chirally controlled CpG oligonucleotide composition are of the same CpG oligonucleotide type. In some embodiments, at least about 20% of the CpG oligonucleotides in a chirally controlled CpG oligonucleotide composition are of the same CpG oligonucleotide type. In some embodiments, at least about 30% of the CpG oligonucleotides in a chirally controlled CpG oligonucleotide composition are of the same CpG oligonucleotide type. In some embodiments, at least about 40% of the CpG oligonucleotides in a chirally controlled CpG oligonucleotide composition are of the same CpG oligonucleotide type. In some embodiments, at least about 50% of the CpG oligonucleotides in a chirally controlled CpG oligonucleotide composition are of the same CpG oligonucleotide type. In some embodiments, at least about 60% of the CpG oligonucleotides in a chirally controlled CpG oligonucleotide composition are of the same CpG oligonucleotide type. In some embodiments, at least about 70% of the CpG oligonucleotides in a chirally controlled CpG oligonucleotide composition are of the same CpG oligonucleotide type. In some embodiments, at least about 80% of the CpG oligonucleotides in a chirally controlled CpG oligonucleotide composition are of the same CpG oligonucleotide type. In some embodiments, at least about 90% of the CpG oligonucleotides in a chirally controlled CpG oligonucleotide composition are of the same CpG oligonucleotide type. In some embodiments, at least about 92% of the CpG oligonucleotides in a chirally controlled CpG oligonucleotide composition are of the same CpG oligonucleotide type. In some embodiments, at least about 94% of the CpG oligonucleotides in a chirally controlled CpG oligonucleotide composition are of the same CpG oligonucleotide type. In some embodiments, at least about 95% of the CpG oligonucleotides in a chirally controlled CpG oligonucleotide composition are of the same CpG oligonucleotide type. In some embodiments, at least about 96% of the CpG oligonucleotides in a chirally controlled CpG oligonucleotide composition are of the same CpG oligonucleotide type. In some embodiments, at least about 97% of the CpG oligonucleotides in a chirally controlled CpG oligonucleotide composition are of the same CpG oligonucleotide type. In some embodiments, at least about 98% of the CpG oligonucleotides in a chirally controlled CpG oligonucleotide composition are of the same CpG oligonucleotide type. In some embodiments, at least about 99% of the CpG oligonucleotides in a chirally controlled CpG oligonucleotide composition are of the same CpG oligonucleotide type.

[0682] In some embodiments, purity of a chirally controlled CpG oligonucleotide composition can be controlled by stereoselectivity of each coupling step in its preparation process. In some embodiments, a coupling step has a stereoselectivity (e.g., diastereoselectivity) of 60% (60% of the new internucleotidic linkage formed from the coupling step has the intended stereochemistry). After such a coupling step, the new internucleotidic linkage formed can be referred to have a 60% purity. In some embodiments, each coupling step has a stereoselectivity of at least 60%. In some embodiments, each coupling step has a stereoselectivity of at least 70%. In some embodiments, each coupling step has a stereoselectivity of at least 80%. In some embodiments, each coupling step has a stereoselectivity of at least 85%. In some embodiments, each coupling step has a stereoselectivity of at least 90%. In some embodiments, each coupling step has a stereoselectivity of at least 91%. In some embodiments, each coupling step has a stereoselectivity of at least 92%. In some embodiments, each coupling step has a stereoselectivity of at least 93%. In some embodiments, each coupling step has a stereoselectivity of at least 94%. In some embodiments, each coupling step has a stereoselectivity of at least 95%. In some embodiments, each coupling step has a stereoselectivity of at least 96%. In some embodiments, each coupling step has a stereoselectivity of at least 97%. In some embodiments, each coupling step has a stereoselectivity of at least 98%. In some embodiments, each coupling step has a stereoselectivity of at least 99%. In some embodiments, each coupling step has a stereoselectivity of at least 99.5%. In some embodiments, each coupling step has a stereoselectivity of virtually 100%. In some embodiments, a coupling step has a stereoselectivity of virtually 100% in that all detectable products from the coupling step by an analytical method (e.g., NMR, HPLC, etc.) have the intended stereoselectivity. In some embodiments, stereoselectivity of a chiral internucleotidic linkage in an oligonucleotide may be measured through a model reaction, e.g. formation of a dimer under essentially the same or comparable conditions wherein the dimer has the same internucleotidic linkage as the chiral internucleotidic linkage, the 5′-nucleoside of the dimer is the same as the nucleoside to the 5′-end of the chiral internucleotidic linkage, and the 3′-nucleoside of the dimer is the same as the nucleoside to the 3′-end of the chiral internucleotidic linkage (e.g., for fU*SfJ*SfC*SfU, through the dimer of fU*SfC). As appreciated by a person having ordinary skill in the art, percentage of oligonucleotides of a particular type having n internucleotidic linkages in a preparation may be calculated as SE¹*SE²*SE³* . . . SEⁿ, wherein SE¹, SE², SE³, SEⁿ is independently the stereoselectivity of the 1^{st}, 2^{nd}, 3^{rd} . . . , and n^{th} chiral internucleotidic linkage.

[0683] In some embodiments, in provided compositions, at least 0.5%, 1%, 2%, 3%, 4%, 5%, 6%, 7%, 8%, 9%, 10%, 20%, 30%, 40%, 50%, 60%, 70%, 75%, 80%, 81%, 82%, 83%, 84%, 85%, 86%, 87%, 88%, 89%, 90%, 91%, 92%, 93%, 94%, 95%, 96%, 97%, 97% or 99% of oligonucleotides that have the base sequence of a particular oligonucleotide type (defined by 1) base sequence; 2) pattern of backbone linkages; 3) pattern of backbone chiral centers; and 4) pattern of backbone phosphorus modifications) are oligonucleotides of the particular oligonucleotide type. In some embodiments, at least 0.5%, 1%, 2%, 3%, 4%, 5%, 6%, 7%, 8%, 9%, 10%, 20%, 30%, 40%, 50%, 60%, 70%, 75%, 80%, 81%, 82%, 83%, 84%, 85%, 86%, 87%, 88%, 89%, 90%, 91%, 92%, 93%, 94%, 95%, 96%, 97%, 97% or 99% of oligonucleotides that have the base sequence, the pattern of backbone linkages, and the pattern of backbone phosphorus modifications of a particular oligonucleotide type are oligonucleotides of the particular oligonucleotide type. In some embodiments, the percentage is at least 0.5%. In some embodiments, the percentage is at least 1%. In some embodiments, the percentage is at least 2%. In some embodiments, the percentage is at least 3%. In some embodiments, the percentage is at least 4%. In some embodiments, the percentage is at least 5%. In some embodiments, the percentage is at least 6%. In some embodiments, the percentage is at least 7%. In some embodiments, the percentage is at least 8%. In some embodiments, the percentage is at least 9%. In some embodiments, the percentage is at least 10%. In some embodiments, the percentage is at least 20%. In some embodiments, the percentage is at least 30%. In some embodiments, the percentage is at least 40%. In some embodiments, the percentage is at least 50%. In some embodiments, the percentage is at least 60%. In some embodiments, the percentage is at least 70%. In some embodiments, the percentage is at least 75%. In some embodiments, the percentage is at least 80%. In some embodiments, the percentage is at least 81%. In some embodiments, the percentage is at least 82%. In some embodiments, the percentage is at least 83%. In some embodiments, the percentage is at least 84%. In some embodiments, the percentage is at least 85%. In some embodiments, the percentage is at least 86%. In some embodiments, the percentage is at least 87%. In some embodiments, the percentage is at least 88%. In some embodiments, the percentage is at least 89%. In some embodiments, the percentage is at least 90%. In some embodiments, the percentage is at least 91%. In some embodiments, the percentage is at least 92%. In some embodiments, the percentage is at least 93%. In some embodiments, the percentage is at least 94%. In some embodiments, the percentage is at least 95%. In some embodiments, the percentage is at least 96%. In some embodiments, the percentage is at least 97%. In some embodiments, the percentage is at least 98%. In some embodiments, the percentage is at least 99%.

[0684] In some embodiments, a stereopure CpG oligonucleotide composition is highly pure. As a non-limiting example, a chirally controlled composition of CpG oligonucleotide WV-1512, described herein, is 94.00% pure (batch 2), as determined by analytical anion exchange chromatography. The purity of other chirally controlled oligonucleotide compositions described herein include: WV1698 (batch 1), 88.10%; WV1696.01: 79.79%; and WV1701 (batch 1), 94.41%.

[0685] In some embodiments, a chirally controlled CpG oligonucleotide composition is at least 30% pure. In some embodiments, a chirally controlled CpG oligonucleotide composition is at least 40% pure. In some embodiments, a chirally controlled CpG oligonucleotide composition is at least 50% pure. In some embodiments, a chirally controlled CpG oligonucleotide composition is at least 60% pure. In some embodiments, a chirally controlled CpG oligonucleotide composition is at least 70% pure. In some embodiments, a chirally controlled CpG oligonucleotide composition is at least 80% pure. In some embodiments, a chirally controlled CpG oligonucleotide composition is at least 90% pure. In some embodiments, a chirally controlled CpG oligonucleotide composition is at least 30% pure as determined by analytical anion exchange chromatography. In some embodiments, a chirally controlled CpG oligonucleotide composition is at least 40% pure as determined by analytical anion exchange chromatography. In some embodiments, a chirally controlled CpG oligonucleotide composition is at least 50% pure as determined by analytical anion exchange chromatography. In some embodiments, a chirally controlled CpG oligonucleotide composition is at least 60% pure as determined by analytical anion exchange chromatography. In some embodiments, a chirally controlled CpG oligonucleotide composition is at least 70% pure as determined by analytical anion exchange chromatography. In some embodiments, a chirally controlled CpG oligonucleotide composition is at least 80% pure as determined by analytical anion exchange chromatography. In some embodiments, a chirally controlled CpG oligonucleotide composition is at least 90% pure as determined by analytical anion exchange chromatography.

[0686] As described herein, in some embodiments, provided CpG oligonucleotides comprises one or more wing regions and a core region. In some embodiments, a wing region comprises a structural feature that is not in a core region. In some embodiments, a wing and core can be defined by any structural elements, e.g., base modifications (e.g., methylated/non-methylated, methylation at position 1/methylation at position 2, etc.), sugar modifications (e.g., modified/non-modified, 2′-modification/another type of modification, one type of 2′-modification/another type of 2′-modification, etc.), backbone linkage types (e.g., phosphate/phosphorothioate, phosphorothioate/substituted phosphorothioate, etc.), backbone chiral center stereochemistry(e.g., all Sp/all Rp, (SpRp) repeats/all Rp, etc.), backbone phosphorus modification types (e.g., s1/s2, s1/s3, etc.), etc.

[0687] In some embodiments, a wing and core is defined by nucleoside modifications, wherein a wing comprises a nucleoside modification that the core region does not have. In some embodiments, a wing and core is defined by sugar modifications, wherein a wing comprises a sugar modification that the core region does not have. In some embodiments, a sugar modification is a 2′-modification. In some embodiments, a sugar modification is 2′-OR¹. In some embodiments, a sugar modification is 2′-MOE. In some embodiments, a sugar modification is 2′-OMe. Additionally example sugar modifications are described in the present disclosure. In some embodiments, a wing and core is defined by internucleotidic linkages, wherein a wing comprises a internucleotidic linkage type (e.g., natural phosphate linkage, a type of modified internucleotidic linkage, etc.) that the core region does not have. In some embodiments, a wing and core is defined by internucleotidic linkages, wherein a wing has a pattern of backbone linkage that is different from that of the core.

[0688] In some embodiments, CpG oligonucleotides in provided compositions have a wing-core or core-wing structure (hemimer). In some embodiments, CpG oligonucleotides in provided compositions have a wing-core structure of nucleoside modifications. In some embodiments, CpG oligonucleotides in provided compositions have a core-wing structure (another type of hemimer). In some embodiments, CpG oligonucleotides in provided compositions have a core-wing structure of nucleoside modifications. In some embodiments, CpG oligonucleotides in provided compositions have a wing-core-wing structure (gapmer). In some embodiments, CpG oligonucleotides in provided compositions have a wing-core-wing structure of nucleoside modifications. In some embodiments, a wing and core is defined by modifications of the sugar moieties. In some embodiments, a wing and core is defined by modifications of the base moieties. In some embodiments, each sugar moiety in the wing region has the same 2′-modification which is not found in the core region. In some embodiments, each sugar moiety in the wing region has the same 2′-modification which is different than any sugar modifications in the core region. In some embodiments, a core region has no sugar modification. In some embodiments, each sugar moiety in the wing region has the same 2′-modification, and the core region has no 2′-modifications. In some embodiments, when two or more wings are present, each wing is defined by its own modifications. In some embodiments, each wing has its own characteristic sugar modification. In some embodiments, each wing has the same characteristic sugar modification differentiating it from a core. In some embodiments, each wing sugar moiety has the same modification. In some embodiments, each wing sugar moiety has the same 2′-modification. In some embodiments, each sugar moiety in a wing region has the same 2′-modification, yet the common 2′-modification in a first wing region can either be the same as or different from the common 2′-modification in a second wing region. In some embodiments, each sugar moiety in a wing region has the same 2′-modification, and the common 2′-modification in a first wing region is the same as the common 2′-modification in a second wing region. In some embodiments, each sugar moiety in a wing region has the same 2′-modification, and the common 2′-modification in a first wing region is different from the common 2′-modification in a second wing region.

[0689] In some embodiments, provided chirally controlled (and/or stereochemically pure) preparations are antisense CpG oligonucleotides (e.g., chiromersen). In some embodiments, provided chirally controlled (and/or stereochemically pure) preparations are siRNA CpG oligonucleotides. In some embodiments, a provided chirally controlled CpG oligonucleotide composition is of CpG oligonucleotides that can be antisense oligonucleotide, antagomir, microRNA, pre-microRNs, antimir, supermir, ribozyme, Ul adaptor, RNA activator, RNAi agent, decoy oligonucleotide, triplex forming oligonucleotide, aptamer or adjuvant. In some embodiments, a chirally controlled CpG oligonucleotide composition is of antisense CpG oligonucleotides. In some embodiments, a chirally controlled CpG oligonucleotide composition is of antagomir CpG oligonucleotides. In some embodiments, a chirally controlled CpG oligonucleotide composition is of microRNA CpG oligonucleotides. In some embodiments, a chirally controlled CpG oligonucleotide composition is of pre-microRNA CpG oligonucleotides. In some embodiments, a chirally controlled CpG oligonucleotide composition is of antimir CpG oligonucleotides. In some embodiments, a chirally controlled CpG oligonucleotide composition is of supermir CpG oligonucleotides. In some embodiments, a chirally controlled CpG oligonucleotide composition is of ribozyme CpG oligonucleotides. In some embodiments, a chirally controlled CpG oligonucleotide composition is of Ul adaptor CpG oligonucleotides. In some embodiments, a chirally controlled CpG oligonucleotide composition is of RNA activator CpG oligonucleotides. In some embodiments, a chirally controlled CpG oligonucleotide composition is of RNAi agent CpG oligonucleotides. In some embodiments, a chirally controlled CpG oligonucleotide composition is of decoy CpG oligonucleotides. In some embodiments, a chirally controlled CpG oligonucleotide composition is of triplex forming CpG oligonucleotides. In some embodiments, a chirally controlled CpG oligonucleotide composition is of aptamer CpG oligonucleotides. In some embodiments, a chirally controlled CpG oligonucleotide composition is of adjuvant CpG oligonucleotides.

[0690] In some embodiments, provided chirally controlled (and/or stereochemically pure) preparations are of CpG oligonucleotides that include one or more modified backbone linkages, bases, and/or sugars.

[0691] In some embodiments, a provided CpG oligonucleotide comprises one or more chiral, modified phosphate linkages. In some embodiments, a provided CpG oligonucleotide comprises two or more chiral, modified phosphate linkages. In some embodiments, a provided CpG oligonucleotide comprises three or more chiral, modified phosphate linkages. In some embodiments, a provided CpG oligonucleotide comprises four or more chiral, modified phosphate linkages. In some embodiments, a provided CpG oligonucleotide comprises five or more chiral, modified phosphate linkages. In some embodiments, a provided CpG oligonucleotide comprises 1, 2, 3, 4, 5, 6, 7, 8, 9, 10, 11, 12, 13, 14, 15, 16, 17, 18, 19, 20, 21, 22, 23, 24, or 25 chiral, modified phosphate linkages. In some embodiments, a provided CpG oligonucleotide type comprises 5 or more chiral, modified phosphate linkages. In some embodiments, a provided CpG oligonucleotide type comprises 6 or more chiral, modified phosphate linkages. In some embodiments, a provided CpG oligonucleotide type comprises 7 or more chiral, modified phosphate linkages. In some embodiments, a provided CpG oligonucleotide type comprises 8 or more chiral, modified phosphate linkages. In some embodiments, a provided CpG oligonucleotide type comprises 9 or more chiral, modified phosphate linkages. In some embodiments, a provided CpG oligonucleotide type comprises 10 or more chiral, modified phosphate linkages. In some embodiments, a provided CpG oligonucleotide type comprises 11 or more chiral, modified phosphate linkages. In some embodiments, a provided CpG oligonucleotide type comprises 12 or more chiral, modified phosphate linkages. In some embodiments, a provided CpG oligonucleotide type comprises 13 or more chiral, modified phosphate linkages. In some embodiments, a provided CpG oligonucleotide type comprises 14 or more chiral, modified phosphate linkages. In some embodiments, a provided CpG oligonucleotide type comprises 15 or more chiral, modified phosphate linkages. In some embodiments, a provided CpG oligonucleotide type comprises 16 or more chiral, modified phosphate linkages. In some embodiments, a provided CpG oligonucleotide type comprises 17 or more chiral, modified phosphate linkages. In some embodiments, a provided CpG oligonucleotide type comprises 18 or more chiral, modified phosphate linkages. In some embodiments, a provided CpG oligonucleotide type comprises 19 or more chiral, modified phosphate linkages. In some embodiments, a provided CpG oligonucleotide type comprises 20 or more chiral, modified phosphate linkages. In some embodiments, a provided CpG oligonucleotide type comprises 21 or more chiral, modified phosphate linkages. In some embodiments, a provided CpG oligonucleotide type comprises 22 or more chiral, modified phosphate linkages. In some embodiments, a provided CpG oligonucleotide type comprises 23 or more chiral, modified phosphate linkages. In some embodiments, a provided CpG oligonucleotide type comprises 24 or more chiral, modified phosphate linkages. In some embodiments, a provided CpG oligonucleotide type comprises 25 or more chiral, modified phosphate linkages.

[0692] In some embodiments, a provided CpG oligonucleotide comprises at least 5%, 10%, 15%, 20%, 25%, 30%, 35%, 40%, 45%, 50%, 55%, 60%, 65%, 70%, 75%, 80%, 85%, 90%, 95%, or 100% chiral, modified phosphate linkages. Example such chiral, modified phosphate linkages are described above and herein. In some embodiments, a provided CpG oligonucleotide comprises at least 5%, 10%, 15%, 20%, 25%, 30%, 35%, 40%, 45%, 50%, 55%, 60%, 65%, 70%, 75%, 80%, 85%, 90%, 95%, or 100% chiral, modified phosphate linkages in the Sp configuration. In some embodiments, a provided CpG oligonucleotide comprises at least 5%, 10%, 15%, 20%, 25%, 30%, 35%, 40%, 45%, 50%, 55%, 60%, 65%, 70%, 75%, 80%, 85%, 90%, 95%, or 100% chiral, modified phosphate linkages in the Rp configuration.

[0693] In some embodiments, provided chirally controlled (and/or stereochemically pure) preparations are of a stereochemical purity of greater than about 80%. In some embodiments, provided chirally controlled (and/or stereochemically pure) preparations are of a stereochemical purity of greater than about 85%. In some embodiments, provided chirally controlled (and/or stereochemically pure) preparations are of a stereochemical purity of greater than about 90%. In some embodiments, provided chirally controlled (and/or stereochemically pure) preparations are of a stereochemical purity of greater than about 91%. In some embodiments, provided chirally controlled (and/or stereochemically pure) preparations are of a stereochemical purity of greater than about 92%. In some embodiments, provided chirally controlled (and/or stereochemically pure) preparations are of a stereochemical purity of greater than about 93%. In some embodiments, provided chirally controlled (and/or stereochemically pure) preparations are of a stereochemical purity of greater than about 94%. In some embodiments, provided chirally controlled (and/or stereochemically pure) preparations are of a stereochemical purity of greater than about 95%. In some embodiments, provided chirally controlled (and/or stereochemically pure) preparations are of a stereochemical purity of greater than about 96%. In some embodiments, provided chirally controlled (and/or stereochemically pure) preparations are of a stereochemical purity of greater than about 97%. In some embodiments, provided chirally controlled (and/or stereochemically pure) preparations are of a stereochemical purity of greater than about 98%. In some embodiments, provided chirally controlled (and/or stereochemically pure) preparations are of a stereochemical purity of greater than about 99%. In some embodiments, such a provided purity can be of one or more chiral internucleotidic linkage is a composition is partially chirally controlled.

[0694] In some embodiments, a chiral, modified phosphate linkage is a chiral phosphorothioate linkage, i.e., phosphorothioate internucleotidic linkage. In some embodiments, a provided CpG oligonucleotide comprises at least 5%, 10%, 15%, 20%, 25%, 30%, 35%, 40%, 45%, 50%, 55%, 60%, 65%, 70%, 75%, 80%, 85%, 90%, 95%, or 100% chiral phosphorothioate internucleotidic linkages. In some embodiments, all chiral, modified phosphate linkages are chiral phosphorothioate internucleotidic linkages. In some embodiments, at least about 10, 20, 30, 40, 50, 60, 70, 80, or 90% chiral phosphorothioate internucleotidic linkages of a provided CpG oligonucleotide are of the Sp conformation. In some embodiments, at least about 10% chiral phosphorothioate internucleotidic linkages of a provided CpG oligonucleotide are of the Sp conformation. In some embodiments, at least about 20% chiral phosphorothioate internucleotidic linkages of a provided CpG oligonucleotide are of the Sp conformation. In some embodiments, at least about 30% chiral phosphorothioate internucleotidic linkages of a provided CpG oligonucleotide are of the Sp conformation. In some embodiments, at least about 40% chiral phosphorothioate internucleotidic linkages of a provided CpG oligonucleotide are of the Sp conformation. In some embodiments, at least about 50% chiral phosphorothioate internucleotidic linkages of a provided CpG oligonucleotide are of the Sp conformation. In some embodiments, at least about 60% chiral phosphorothioate internucleotidic linkages of a provided CpG oligonucleotide are of the Sp conformation. In some embodiments, at least about 70% chiral phosphorothioate internucleotidic linkages of a provided CpG oligonucleotide are of the Sp conformation. In some embodiments, at least about 80% chiral phosphorothioate internucleotidic linkages of a provided CpG oligonucleotide are of the Sp conformation. In some embodiments, at least about 90% chiral phosphorothioate internucleotidic linkages of a provided CpG oligonucleotide are of the Sp conformation. In some embodiments, at least about 95% chiral phosphorothioate internucleotidic linkages of a provided CpG oligonucleotide are of the Sp conformation.

[0695] In some embodiments, at least about 10, 20, 30, 40, 50, 60, 70, 80, or 90% chiral phosphorothioate internucleotidic linkages of a provided CpG oligonucleotide are of the Rp conformation. In some embodiments, at least about 10% chiral phosphorothioate internucleotidic linkages of a provided CpG oligonucleotide are of the Rp conformation. In some embodiments, at least about 20% chiral phosphorothioate internucleotidic linkages of a provided CpG oligonucleotide are of the Rp conformation. In some embodiments, at least about 30% chiral phosphorothioate internucleotidic linkages of a provided CpG oligonucleotide are of the Rp conformation. In some embodiments, at least about 40% chiral phosphorothioate internucleotidic linkages of a provided CpG oligonucleotide are of the Rp conformation. In some embodiments, at least about 50% chiral phosphorothioate internucleotidic linkages of a provided CpG oligonucleotide are of the Rp conformation. In some embodiments, at least about 60% chiral phosphorothioate internucleotidic linkages of a provided CpG oligonucleotide are of the Rp conformation. In some embodiments, at least about 70% chiral phosphorothioate internucleotidic linkages of a provided CpG oligonucleotide are of the Rp conformation. In some embodiments, at least about 80% chiral phosphorothioate internucleotidic linkages of a provided CpG oligonucleotide are of the Rp conformation. In some embodiments, at least about 90% chiral phosphorothioate internucleotidic linkages of a provided CpG oligonucleotide are of the Rp conformation. In some embodiments, at least about 95% chiral phosphorothioate internucleotidic linkages of a provided CpG oligonucleotide are of the Rp conformation.

[0696] In some embodiments, less than about 10, 20, 30, 40, 50, 60, 70, 80, or 90% chiral phosphorothioate internucleotidic linkages of a provided CpG oligonucleotide are of the Rp conformation. In some embodiments, less than about 10% chiral phosphorothioate internucleotidic linkages of a provided CpG oligonucleotide are of the Rp conformation. In some embodiments, less than about 20% chiral phosphorothioate internucleotidic linkages of a provided CpG oligonucleotide are of the Rp conformation. In some embodiments, less than about 30% chiral phosphorothioate internucleotidic linkages of a provided CpG oligonucleotide are of the Rp conformation. In some embodiments, less than about 40% chiral phosphorothioate internucleotidic linkages of a provided CpG oligonucleotide are of the Rp conformation. In some embodiments, less than about 50% chiral phosphorothioate internucleotidic linkages of a provided CpG oligonucleotide are of the Rp conformation. In some embodiments, less than about 60% chiral phosphorothioate internucleotidic linkages of a provided CpG oligonucleotide are of the Rp conformation. In some embodiments, less than about 70% chiral phosphorothioate internucleotidic linkages of a provided CpG oligonucleotide are of the Rp conformation. In some embodiments, less than about 80% chiral phosphorothioate internucleotidic linkages of a provided CpG oligonucleotide are of the Rp conformation. In some embodiments, less than about 90% chiral phosphorothioate internucleotidic linkages of a provided CpG oligonucleotide are of the Rp conformation. In some embodiments, less than about 95% chiral phosphorothioate internucleotidic linkages of a provided CpG oligonucleotide are of the Rp conformation. In some embodiments, a provided CpG oligonucleotide has only one Rp chiral phosphorothioate internucleotidic linkages. In some embodiments, a provided CpG oligonucleotide has only one Rp chiral phosphorothioate internucleotidic linkages, wherein all internucleotide linkages are chiral phosphorothioate internucleotidic linkages.

[0697] In some embodiments, a chiral phosphorothioate internucleotidic linkage is a chiral phosphorothioate diester linkage. In some embodiments, each chiral phosphorothioate internucleotidic linkage is independently a chiral phosphorothioate diester linkage. In some embodiments, each internucleotidic linkage is independently a chiral phosphorothioate diester linkage. In some embodiments, each internucleotidic linkage is independently a chiral phosphorothioate diester linkage, and only one is Rp.

[0698] In some embodiments, provided chirally controlled (and/or stereochemically pure) preparations are of CpG oligonucleotides that contain one or more modified bases. In some embodiments, provided chirally controlled (and/or stereochemically pure) preparations are of CpG oligonucleotides that contain no modified bases. Example such modified bases are described above and herein.

[0699] In some embodiments, CpG oligonucleotides of provided compositions comprise at least 2, 3, 4, 5, 6, 7, 8, 9 or 10 natural phosphate linkages. In some embodiments, CpG oligonucleotides of provided compositions comprise at least one natural phosphate linkage. In some embodiments, CpG oligonucleotides of provided compositions comprise at least two natural phosphate linkages. In some embodiments, CpG oligonucleotides of provided compositions comprise at least three natural phosphate linkages. In some embodiments, CpG oligonucleotides of provided compositions comprise at least four natural phosphate linkages. In some embodiments, CpG oligonucleotides of provided compositions comprise at least five natural phosphate linkages. In some embodiments, CpG oligonucleotides of provided compositions comprise at least six natural phosphate linkages. In some embodiments, CpG oligonucleotides of provided compositions comprise at least seven natural phosphate linkages. In some embodiments, CpG oligonucleotides of provided compositions comprise at least eight natural phosphate linkages. In some embodiments, CpG oligonucleotides of provided compositions comprise at least nine natural phosphate linkages. In some embodiments, CpG oligonucleotides of provided compositions comprise at least ten natural phosphate linkages.

[0700] In some embodiments, CpG oligonucleotides of provided compositions comprise 2, 3, 4, 5, 6, 7, 8, 9 or 10 natural phosphate linkages. In some embodiments, CpG oligonucleotides of provided compositions comprise one natural phosphate linkage. In some embodiments, CpG oligonucleotides of provided compositions comprise two natural phosphate linkages. In some embodiments, CpG oligonucleotides of provided compositions comprise three natural phosphate linkages. In some embodiments, CpG oligonucleotides of provided compositions comprise four natural phosphate linkages. In some embodiments, CpG oligonucleotides of provided compositions comprise five natural phosphate linkages. In some embodiments, CpG oligonucleotides of provided compositions comprise six natural phosphate linkages. In some embodiments, CpG oligonucleotides of provided compositions comprise seven natural phosphate linkages. In some embodiments, CpG oligonucleotides of provided compositions comprise eight natural phosphate linkages. In some embodiments, CpG oligonucleotides of provided compositions comprise nine natural phosphate linkages. In some embodiments, CpG oligonucleotides of provided compositions comprise ten natural phosphate linkages.

[0701] In some embodiments, CpG oligonucleotides of provided compositions comprise at least 2, 3, 4, 5, 6, 7, 8, 9 or 10 consecutive natural phosphate linkages. In some embodiments, CpG oligonucleotides of provided compositions comprise at least two consecutive natural phosphate linkages. In some embodiments, CpG oligonucleotides of provided compositions comprise at least three consecutive natural phosphate linkages. In some embodiments, CpG oligonucleotides of provided compositions comprise at least four consecutive natural phosphate linkages. In some embodiments, CpG oligonucleotides of provided compositions comprise at least five consecutive natural phosphate linkages. In some embodiments, CpG oligonucleotides of provided compositions comprise at least six consecutive natural phosphate linkages. In some embodiments, CpG oligonucleotides of provided compositions comprise at least seven consecutive natural phosphate linkages. In some embodiments, CpG oligonucleotides of provided compositions comprise at least eight consecutive natural phosphate linkages. In some embodiments, CpG oligonucleotides of provided compositions comprise at least nine consecutive natural phosphate linkages. In some embodiments, CpG oligonucleotides of provided compositions comprise at least ten consecutive natural phosphate linkages.

[0702] In some embodiments, CpG oligonucleotides of provided compositions comprise 2, 3, 4, 5, 6, 7, 8, 9 or 10 consecutive natural phosphate linkages. In some embodiments, CpG oligonucleotides of provided compositions comprise two consecutive natural phosphate linkages. In some embodiments, CpG oligonucleotides of provided compositions comprise three consecutive natural phosphate linkages. In some embodiments, CpG oligonucleotides of provided compositions comprise four consecutive natural phosphate linkages. In some embodiments, CpG oligonucleotides of provided compositions comprise five consecutive natural phosphate linkages. In some embodiments, CpG oligonucleotides of provided compositions comprise six consecutive natural phosphate linkages. In some embodiments, CpG oligonucleotides of provided compositions comprise seven consecutive natural phosphate linkages. In some embodiments, CpG oligonucleotides of provided compositions comprise eight consecutive natural phosphate linkages. In some embodiments, CpG oligonucleotides of provided compositions comprise nine consecutive natural phosphate linkages. In some embodiments, CpG oligonucleotides of provided compositions comprise ten consecutive natural phosphate linkages.

[0703] In some embodiments, provided chirally controlled (and/or stereochemically pure) preparations are of CpG oligonucleotides having a common base sequence of at least 8 bases. In some embodiments, provided chirally controlled (and/or stereochemically pure) preparations are of CpG oligonucleotides having a common base sequence of at least 9 bases. In some embodiments, provided chirally controlled (and/or stereochemically pure) preparations are of CpG oligonucleotides having a common base sequence of at least 10 bases. In some embodiments, provided chirally controlled (and/or stereochemically pure) preparations are of CpG oligonucleotides having a common base sequence of at least 11 bases. In some embodiments, provided chirally controlled (and/or stereochemically pure) preparations are of CpG oligonucleotides having a common base sequence of at least 12 bases. In some embodiments, provided chirally controlled (and/or stereochemically pure) preparations are of CpG oligonucleotides having a common base sequence of at least 13 bases. In some embodiments, provided chirally controlled (and/or stereochemically pure) preparations are of CpG oligonucleotides having a common base sequence of at least 14 bases. In some embodiments, provided chirally controlled (and/or stereochemically pure) preparations are of CpG oligonucleotides having a common base sequence of at least 15 bases. In some embodiments, provided chirally controlled (and/or stereochemically pure) preparations are of CpG oligonucleotides having a common base sequence of at least 16 bases. In some embodiments, provided chirally controlled (and/or stereochemically pure) preparations are of CpG oligonucleotides having a common base sequence of at least 17 bases. In some embodiments, provided chirally controlled (and/or stereochemically pure) preparations are of CpG oligonucleotides having a common base sequence of at least 18 bases. In some embodiments, provided chirally controlled (and/or stereochemically pure) preparations are of CpG oligonucleotides having a common base sequence of at least 19 bases. In some embodiments, provided chirally controlled (and/or stereochemically pure) preparations are of CpG oligonucleotides having a common base sequence of at least 20 bases. In some embodiments, provided chirally controlled (and/or stereochemically pure) preparations are of CpG oligonucleotides having a common base sequence of at least 21 bases. In some embodiments, provided chirally controlled (and/or stereochemically pure) preparations are of CpG oligonucleotides having a common base sequence of at least 22 bases. In some embodiments, provided chirally controlled (and/or stereochemically pure) preparations are of CpG oligonucleotides having a common base sequence of at least 23 bases. In some embodiments, provided chirally controlled (and/or stereochemically pure) preparations are of CpG oligonucleotides having a common base sequence of at least 24 bases. In some embodiments, provided chirally controlled (and/or stereochemically pure) preparations are of CpG oligonucleotides having a common base sequence of at least 25 bases. In some embodiments, provided chirally controlled (and/or stereochemically pure) preparations are of CpG oligonucleotides having a common base sequence of at least 30, 35, 40, 45, 50, 55, 60, 65, 70, or 75 bases.

[0704] In some embodiments, provided compositions comprise CpG oligonucleotides containing one or more residues which are modified at the sugar moiety. In some embodiments, provided compositions comprise CpG oligonucleotides containing one or more residues which are modified at the 2′ position of the sugar moiety (referred to herein as a “2′-modification”). Example such modifications are described above and herein and include, but are not limited to, 2′-OMe, 2′-MOE, 2′-LNA, 2′-F, FRNA, FANA, S-cEt, etc. In some embodiments, provided compositions comprise CpG oligonucleotides containing one or more residues which are 2′-modified. For example, in some embodiments, provided CpG oligonucleotides contain one or more residues which are 2′-O-methoxyethyl (2′-MOE)-modified residues. In some embodiments, provided compositions comprise CpG oligonucleotides which do not contain any 2′-modifications. In some embodiments, provided compositions are CpG oligonucleotides which do not contain any 2′-MOE residues. That is, in some embodiments, provided CpG oligonucleotides are not MOE-modified. Additional example sugar modifications are described in the present disclosure.

[0705] In some embodiments, provided CpG oligonucleotides are of a general motif of wing-core or core-wing (hemimer, also represented herein generally as X-Y or Y-X, respectively). In some embodiments, provided CpG oligonucleotides are of a general motif of wing-core-wing (gapmer, also represented herein generally as X-Y-X). In some embodiments, each wing region independently contains one or more residues having a particular modification, which modification is absent from the core “Y” portion. In some embodiments, each wing region independently contains one or more residues having a particular nucleoside modification, which modification is absent from the core “Y” portion. In some embodiments, each wing region independently contains one or more residues having a particular base modification, which modification is absent from the core “Y” portion. In some embodiments, each wing region independently contains one or more residues having a particular sugar modification, which modification is absent from the core “Y” portion. Example sugar modifications are widely known in the art. In some embodiments, a sugar modification is a modification selected from those modifications described in U.S. Pat. No. 9,006,198, which sugar modifications are incorporated herein by references. Additional example sugar modifications are described in the present disclosure. In some embodiment, each wing contains one or more residues having a 2′ modification that is not present in the core portion. In some embodiments, a 2′-modification is 2′-OR¹, wherein R¹ is as defined and described in the present disclosure.

[0706] In some embodiments, provided CpG oligonucleotides have a wing-core motif represented as X-Y, or a core-wing motif represented as Y-X, wherein the residues at the “X” portion are sugar modified residues of a particular type and the residues in the core “Y” portion are not sugar modified residues of the same particular type. In some embodiments, provided CpG oligonucleotides have a wing-core-wing motif represented as X-Y-X, wherein the residues at each “X” portion are sugar modified residues of a particular type and the residues in the core “Y” portion are not sugar modified residues of the same particular type. In some embodiments, provided CpG oligonucleotides have a wing-core motif represented as X-Y, or a core-wing motif represented as Y-X, wherein the residues at the “X” portion are 2′-modified residues of a particular type and the residues in the core “Y” portion are not 2′-modified residues of the same particular type. In some embodiments, provided CpG oligonucleotides have a wing-core motif represented as X-Y, wherein the residues at the “X” portion are 2′-modified residues of a particular type and the residues in the core “Y” portion are not 2′-modified residues of the same particular type. In some embodiments, provided CpG oligonucleotides have a core-wing motif represented as Y-X, wherein the residues at the “X” portion are 2′-modified residues of a particular type and the residues in the core “Y” portion are not 2′-modified residues of the same particular type. In some embodiments, provided CpG oligonucleotides have a wing-core-wing motif represented as X-Y-X, wherein the residues at each “X” portion are 2′-modified residues of a particular type and the residues in the core “Y” portion are not 2′-modified residues of the same particular type. In some embodiments, provided CpG oligonucleotides have a wing-core motif represented as X-Y, wherein the residues at the “X” portion are 2′-modified residues of a particular type and the residues in the core “Y” portion are 2′-deoxyribonucleoside. In some embodiments, provided CpG oligonucleotides have a core-wing motif represented as Y-X, wherein the residues at the “X” portion are 2′-modified residues of a particular type and the residues in the core “Y” portion are 2′-deoxyribonucleoside. In some embodiments, provided CpG oligonucleotides have a wing-core-wing motif represented as X-Y-X, wherein the residues at each “X” portion are 2′-modified residues of a particular type and the residues in the core “Y” portion are 2′-deoxyribonucleoside. In some embodiments, provided CpG oligonucleotides have a wing-core-wing motif represented as X-Y-X, wherein the residues at each “X” portion are 2′-modified residues of a particular type and the residues in the core “Y” portion are 2′-deoxyribonucleoside. For instance, in some embodiments, provided CpG oligonucleotides have a wing-core-wing motif represented as X-Y-X, wherein the residues at each “X” portion are 2′-MOE-modified residues and the residues in the core “Y” portion are not 2′-MOE-modified residues. In some embodiments, provided CpG oligonucleotides have a wing-core-wing motif represented as X-Y-X, wherein the residues at each “X” portion are 2′-MOE-modified residues and the residues in the core “Y” portion are 2′-deoxyribonucleoside. One of skill in the relevant arts will recognize that all such 2′-modifications described above and herein are contemplated in the context of such X-Y, Y-X and/or X-Y-X motifs.

[0707] In some embodiments, a wing has a length of one or more bases. In some embodiments, a wing has a length of two or more bases. In some embodiments, a wing has a length of three or more bases. In some embodiments, a wing has a length of four or more bases. In some embodiments, a wing has a length of five or more bases. In some embodiments, a wing has a length of six or more bases. In some embodiments, a wing has a length of seven or more bases. In some embodiments, a wing has a length of eight or more bases. In some embodiments, a wing has a length of nine or more bases. In some embodiments, a wing has a length of ten or more bases. In some embodiments, a wing has a length of 11 or more bases. In some embodiments, a wing has a length of 12 or more bases. In some embodiments, a wing has a length of 13 or more bases. In some embodiments, a wing has a length of 14 or more bases. In some embodiments, a wing has a length of 15 or more bases. In some embodiments, a wing has a length of 16 or more bases. In some embodiments, a wing has a length of 17 or more bases. In some embodiments, a wing has a length of 18 or more bases. In some embodiments, a wing has a length of 19 or more bases. In some embodiments, a wing has a length of ten or more bases.

[0708] In some embodiments, a wing has a length of one base. In some embodiments, a wing has a length of two bases. In some embodiments, a wing has a length of three bases. In some embodiments, a wing has a length of four bases. In some embodiments, a wing has a length of five bases. In some embodiments, a wing has a length of six bases. In some embodiments, a wing has a length of seven bases. In some embodiments, a wing has a length of eight bases. In some embodiments, a wing has a length of nine bases. In some embodiments, a wing has a length of ten bases. In some embodiments, a wing has a length of 11 bases. In some embodiments, a wing has a length of 12 bases. In some embodiments, a wing has a length of 13 bases. In some embodiments, a wing has a length of 14 bases. In some embodiments, a wing has a length of 15 bases. In some embodiments, a wing has a length of 16 bases. In some embodiments, a wing has a length of 17 bases. In some embodiments, a wing has a length of 18 bases. In some embodiments, a wing has a length of 19 bases. In some embodiments, a wing has a length of ten bases.

[0709] In some embodiments, a wing comprises one or more chiral internucleotidic linkages. In some embodiments, a wing comprises one or more natural phosphate linkages. In some embodiments, a wing comprises one or more chiral internucleotidic linkages and one or more natural phosphate linkages. In some embodiments, a wing comprises one or more chiral internucleotidic linkages and two or more natural phosphate linkages. In some embodiments, a wing comprises one or more chiral internucleotidic linkages and two or more natural phosphate linkages, wherein two or more natural phosphate linkages are consecutive. In some embodiments, a wing comprises no chiral internucleotidic linkages. In some embodiments, each wing linkage is a natural phosphate linkage. In some embodiments, a wing comprises no phosphate linkages. In some embodiments, each wing is independently a chiral internucleotidic linkage.

[0710] In some embodiments, each wing region independently comprises one or more chiral internucleotidic linkages. In some embodiments, each wing region independently comprises one or more natural phosphate linkages. In some embodiments, each wing region independently comprises one or more chiral internucleotidic linkages and one or more natural phosphate linkages. In some embodiments, each wing region independently comprises one or more chiral internucleotidic linkages and two or more natural phosphate linkages. In some embodiments, each wing region independently comprises one or more chiral internucleotidic linkages and two or more natural phosphate linkages, wherein two or more natural phosphate linkages are consecutive.

[0711] In some embodiments, each wing region independently comprises at least one chiral internucleotidic linkage. In some embodiments, each wing region independently comprises at least two chiral internucleotidic linkages. In some embodiments, each wing region independently comprises at least three chiral internucleotidic linkages. In some embodiments, each wing region independently comprises at least four chiral internucleotidic linkages. In some embodiments, each wing region independently comprises at least five chiral internucleotidic linkages. In some embodiments, each wing region independently comprises at least six chiral internucleotidic linkages. In some embodiments, each wing region independently comprises at least seven chiral internucleotidic linkages. In some embodiments, each wing region independently comprises at least eight chiral internucleotidic linkages. In some embodiments, each wing region independently comprises at least nine chiral internucleotidic linkages. In some embodiments, each wing region independently comprises at least ten chiral internucleotidic linkages. In some embodiments, each wing region independently comprises at least 11 chiral internucleotidic linkages. In some embodiments, each wing region independently comprises at least 12 chiral internucleotidic linkages. In some embodiments, each wing region independently comprises at least 13 chiral internucleotidic linkages. In some embodiments, each wing region independently comprises at least 14 chiral internucleotidic linkages. In some embodiments, each wing region independently comprises at least 15 chiral internucleotidic linkages. In some embodiments, each wing region independently comprises at least 16 chiral internucleotidic linkages. In some embodiments, each wing region independently comprises at least 17 chiral internucleotidic linkages. In some embodiments, each wing region independently comprises at least 18 chiral internucleotidic linkages. In some embodiments, each wing region independently comprises at least 19 chiral internucleotidic linkages. In some embodiments, each wing region independently comprises at least 20 chiral internucleotidic linkages.

[0712] In some embodiments, each wing region independently comprises one chiral internucleotidic linkage. In some embodiments, each wing region independently comprises two chiral internucleotidic linkages. In some embodiments, each wing region independently comprises three chiral internucleotidic linkages. In some embodiments, each wing region independently comprises four chiral internucleotidic linkages. In some embodiments, each wing region independently comprises five chiral internucleotidic linkages. In some embodiments, each wing region independently comprises six chiral internucleotidic linkages. In some embodiments, each wing region independently comprises seven chiral internucleotidic linkages. In some embodiments, each wing region independently comprises eight chiral internucleotidic linkages. In some embodiments, each wing region independently comprises nine chiral internucleotidic linkages. In some embodiments, each wing region independently comprises ten chiral internucleotidic linkages. In some embodiments, each wing region independently comprises 11 chiral internucleotidic linkages. In some embodiments, each wing region independently comprises 12 chiral internucleotidic linkages. In some embodiments, each wing region independently comprises 13 chiral internucleotidic linkages. In some embodiments, each wing region independently comprises 14 chiral internucleotidic linkages. In some embodiments, each wing region independently comprises 15 chiral internucleotidic linkages. In some embodiments, each wing region independently comprises 16 chiral internucleotidic linkages. In some embodiments, each wing region independently comprises 17 chiral internucleotidic linkages. In some embodiments, each wing region independently comprises 18 chiral internucleotidic linkages. In some embodiments, each wing region independently comprises 19 chiral internucleotidic linkages. In some embodiments, each wing region independently comprises 20 chiral internucleotidic linkages.

[0713] In some embodiments, each wing region independently comprises at least one consecutive natural phosphate linkage. In some embodiments, each wing region independently comprises at least two consecutive chiral internucleotidic linkages. In some embodiments, each wing region independently comprises at least three consecutive chiral internucleotidic linkages. In some embodiments, each wing region independently comprises at least four consecutive chiral internucleotidic linkages. In some embodiments, each wing region independently comprises at least five consecutive chiral internucleotidic linkages. In some embodiments, each wing region independently comprises at least six consecutive chiral internucleotidic linkages. In some embodiments, each wing region independently comprises at least seven consecutive chiral internucleotidic linkages. In some embodiments, each wing region independently comprises at least eight consecutive chiral internucleotidic linkages. In some embodiments, each wing region independently comprises at least nine consecutive chiral internucleotidic linkages. In some embodiments, each wing region independently comprises at least ten consecutive chiral internucleotidic linkages. In some embodiments, each wing region independently comprises at least 11 consecutive chiral internucleotidic linkages. In some embodiments, each wing region independently comprises at least 12 consecutive chiral internucleotidic linkages. In some embodiments, each wing region independently comprises at least 13 consecutive chiral internucleotidic linkages. In some embodiments, each wing region independently comprises at least 14 consecutive chiral internucleotidic linkages. In some embodiments, each wing region independently comprises at least 15 consecutive chiral internucleotidic linkages. In some embodiments, each wing region independently comprises at least 16 consecutive chiral internucleotidic linkages. In some embodiments, each wing region independently comprises at least 17 consecutive chiral internucleotidic linkages. In some embodiments, each wing region independently comprises at least 18 consecutive chiral internucleotidic linkages. In some embodiments, each wing region independently comprises at least 19 consecutive chiral internucleotidic linkages. In some embodiments, each wing region independently comprises at least 20 consecutive chiral internucleotidic linkages.

[0714] In some embodiments, each wing region independently comprises one consecutive natural phosphate linkage. In some embodiments, each wing region independently comprises two consecutive chiral internucleotidic linkages. In some embodiments, each wing region independently comprises three consecutive chiral internucleotidic linkages. In some embodiments, each wing region independently comprises four consecutive chiral internucleotidic linkages. In some embodiments, each wing region independently comprises five consecutive chiral internucleotidic linkages. In some embodiments, each wing region independently comprises six consecutive chiral internucleotidic linkages. In some embodiments, each wing region independently comprises seven consecutive chiral internucleotidic linkages. In some embodiments, each wing region independently comprises eight consecutive chiral internucleotidic linkages. In some embodiments, each wing region independently comprises nine consecutive chiral internucleotidic linkages. In some embodiments, each wing region independently comprises ten consecutive chiral internucleotidic linkages. In some embodiments, each wing region independently comprises 11 consecutive chiral internucleotidic linkages. In some embodiments, each wing region independently comprises 12 consecutive chiral internucleotidic linkages. In some embodiments, each wing region independently comprises 13 consecutive chiral internucleotidic linkages. In some embodiments, each wing region independently comprises 14 consecutive chiral internucleotidic linkages. In some embodiments, each wing region independently comprises 15 consecutive chiral internucleotidic linkages. In some embodiments, each wing region independently comprises 16 consecutive chiral internucleotidic linkages. In some embodiments, each wing region independently comprises 17 consecutive chiral internucleotidic linkages. In some embodiments, each wing region independently comprises 18 consecutive chiral internucleotidic linkages. In some embodiments, each wing region independently comprises 19 consecutive chiral internucleotidic linkages. In some embodiments, each wing region independently comprises 20 consecutive chiral internucleotidic linkages.

[0715] In some embodiments, each wing region independently comprises at least one natural phosphate linkage. In some embodiments, each wing region independently comprises at least two natural phosphate linkages. In some embodiments, each wing region independently comprises at least three natural phosphate linkages. In some embodiments, each wing region independently comprises at least four natural phosphate linkages. In some embodiments, each wing region independently comprises at least five natural phosphate linkages. In some embodiments, each wing region independently comprises at least six natural phosphate linkages. In some embodiments, each wing region independently comprises at least seven natural phosphate linkages. In some embodiments, each wing region independently comprises at least eight natural phosphate linkages. In some embodiments, each wing region independently comprises at least nine natural phosphate linkages. In some embodiments, each wing region independently comprises at least ten natural phosphate linkages. In some embodiments, each wing region independently comprises at least 11 natural phosphate linkages. In some embodiments, each wing region independently comprises at least 12 natural phosphate linkages. In some embodiments, each wing region independently comprises at least 13 natural phosphate linkages. In some embodiments, each wing region independently comprises at least 14 natural phosphate linkages. In some embodiments, each wing region independently comprises at least 15 natural phosphate linkages. In some embodiments, each wing region independently comprises at least 16 natural phosphate linkages. In some embodiments, each wing region independently comprises at least 17 natural phosphate linkages. In some embodiments, each wing region independently comprises at least 18 natural phosphate linkages. In some embodiments, each wing region independently comprises at least 19 natural phosphate linkages. In some embodiments, each wing region independently comprises at least 20 natural phosphate linkages.

[0716] In some embodiments, each wing region independently comprises one natural phosphate linkage. In some embodiments, each wing region independently comprises two natural phosphate linkages. In some embodiments, each wing region independently comprises three natural phosphate linkages. In some embodiments, each wing region independently comprises four natural phosphate linkages. In some embodiments, each wing region independently comprises five natural phosphate linkages. In some embodiments, each wing region independently comprises six natural phosphate linkages. In some embodiments, each wing region independently comprises seven natural phosphate linkages. In some embodiments, each wing region independently comprises eight natural phosphate linkages. In some embodiments, each wing region independently comprises nine natural phosphate linkages. In some embodiments, each wing region independently comprises ten natural phosphate linkages. In some embodiments, each wing region independently comprises 11 natural phosphate linkages. In some embodiments, each wing region independently comprises 12 natural phosphate linkages. In some embodiments, each wing region independently comprises 13 natural phosphate linkages. In some embodiments, each wing region independently comprises 14 natural phosphate linkages. In some embodiments, each wing region independently comprises 15 natural phosphate linkages. In some embodiments, each wing region independently comprises 16 natural phosphate linkages. In some embodiments, each wing region independently comprises 17 natural phosphate linkages. In some embodiments, each wing region independently comprises 18 natural phosphate linkages. In some embodiments, each wing region independently comprises 19 natural phosphate linkages. In some embodiments, each wing region independently comprises 20 natural phosphate linkages.

[0717] In some embodiments, each wing region independently comprises at least one consecutive natural phosphate linkage. In some embodiments, each wing region independently comprises at least two consecutive natural phosphate linkages. In some embodiments, each wing region independently comprises at least three consecutive natural phosphate linkages. In some embodiments, each wing region independently comprises at least four consecutive natural phosphate linkages. In some embodiments, each wing region independently comprises at least five consecutive natural phosphate linkages. In some embodiments, each wing region independently comprises at least six consecutive natural phosphate linkages. In some embodiments, each wing region independently comprises at least seven consecutive natural phosphate linkages. In some embodiments, each wing region independently comprises at least eight consecutive natural phosphate linkages. In some embodiments, each wing region independently comprises at least nine consecutive natural phosphate linkages. In some embodiments, each wing region independently comprises at least ten consecutive natural phosphate linkages. In some embodiments, each wing region independently comprises at least 11 consecutive natural phosphate linkages. In some embodiments, each wing region independently comprises at least 12 consecutive natural phosphate linkages. In some embodiments, each wing region independently comprises at least 13 consecutive natural phosphate linkages. In some embodiments, each wing region independently comprises at least 14 consecutive natural phosphate linkages. In some embodiments, each wing region independently comprises at least 15 consecutive natural phosphate linkages. In some embodiments, each wing region independently comprises at least 16 consecutive natural phosphate linkages. In some embodiments, each wing region independently comprises at least 17 consecutive natural phosphate linkages. In some embodiments, each wing region independently comprises at least 18 consecutive natural phosphate linkages. In some embodiments, each wing region independently comprises at least 19 consecutive natural phosphate linkages. In some embodiments, each wing region independently comprises at least 20 consecutive natural phosphate linkages.

[0718] In some embodiments, each wing region independently comprises one consecutive natural phosphate linkage. In some embodiments, each wing region independently comprises two consecutive natural phosphate linkages. In some embodiments, each wing region independently comprises three consecutive natural phosphate linkages. In some embodiments, each wing region independently comprises four consecutive natural phosphate linkages. In some embodiments, each wing region independently comprises five consecutive natural phosphate linkages. In some embodiments, each wing region independently comprises six consecutive natural phosphate linkages. In some embodiments, each wing region independently comprises seven consecutive natural phosphate linkages. In some embodiments, each wing region independently comprises eight consecutive natural phosphate linkages. In some embodiments, each wing region independently comprises nine consecutive natural phosphate linkages. In some embodiments, each wing region independently comprises ten consecutive natural phosphate linkages. In some embodiments, each wing region independently comprises 11 consecutive natural phosphate linkages. In some embodiments, each wing region independently comprises 12 consecutive natural phosphate linkages. In some embodiments, each wing region independently comprises 13 consecutive natural phosphate linkages. In some embodiments, each wing region independently comprises 14 consecutive natural phosphate linkages. In some embodiments, each wing region independently comprises 15 consecutive natural phosphate linkages. In some embodiments, each wing region independently comprises 16 consecutive natural phosphate linkages. In some embodiments, each wing region independently comprises 17 consecutive natural phosphate linkages. In some embodiments, each wing region independently comprises 18 consecutive natural phosphate linkages. In some embodiments, each wing region independently comprises 19 consecutive natural phosphate linkages. In some embodiments, each wing region independently comprises 20 consecutive natural phosphate linkages.

[0719] In some embodiments, a wing is to the 5′-end of a core (5′-end wing). In some embodiments, a wing is to the 3′-end of a core (3′-end wing). A CpG can be at any position of an oligonucleotide, for example, in a wing, in a core, or at a span of a wing and a core.

[0720] In some embodiments, a 5′-end wing comprises one or more modified internucleotidic linkages and one or more natural phosphate internucleotidic linkages. In some embodiments, a 3′-end wing comprises one or more modified internucleotidic linkages and one or more natural phosphate internucleotidic linkages. In some embodiments, each wing independently comprises one or more modified internucleotidic linkages and one or more natural phosphate internucleotidic linkages.

[0721] In some embodiments, a 5′-end wing comprises a modified internucleotidic linkage having one or more natural phosphate linkages connecting two or more nucleosides after (to the 3′-end) the modified internucleotidic linkage in the 5′-end wing. For example, a 5′-end wing mG*SmGmCmAmC comprises a modified internucleotidic linkage (mG*SmG) which has three natural phosphate linkages connecting four nucleosides (mGmCmAmC) after the modified internucleotidic linkage in the 5′-end wing. In some embodiments, a 5′-end wing comprises a modified internucleotidic linkages followed by one or more natural phosphate linkages and/or one or more modified internucleotidic linkages, which are followed by one or more natural phosphate linkages in the 5′-end wing (for example, mG*SmG and mG*SmC in mG*SmG*SmCmAmC). In some embodiments, a 5′-end wing comprises a modified internucleotidic linkages followed by one or more natural phosphate linkages in the 5′-end wing. In some embodiments, a 5′-end wing comprises a modified internucleotidic linkages followed by one or more consecutive natural phosphate linkages in the 5′-end wing. In some embodiments, a 5′-end wing comprises a natural phosphate linkage between the two nucleosides at its 3′-end. For example, a 5′-end wing mG*SmGmCmAmC has a natural phosphate linkage between the two nucleosides at its 3′-end (mG*SmGmCmAmC).

[0722] In some embodiments, a 3′-end wing comprises a modified internucleotidic linkage having one or more natural phosphate linkages connecting two or more nucleosides before (to the 5′-end) the modified internucleotidic linkage in the 3′-end wing. For example, a 3′-end wing mAmCmUmU*SmC comprises a modified internucleotidic linkage (mU*SmC) which has three natural phosphate linkages connecting four nucleosides (mAmCmUmU) before the modified internucleotidic linkage in the 3′-end wing. In some embodiments, a 3′-end wing comprises a modified internucleotidic linkages preceded by one or more natural phosphate linkages and/or one or more modified internucleotidic linkages, which are preceded by one or more natural phosphate linkages in the 3′-end wing (for example, mU*SmU and mU*SmC in mAmCmU*SmU*SmC). In some embodiments, a 3′-end wing comprises a modified internucleotidic linkages preceded by one or more natural phosphate linkages in the 3′-end wing. In some embodiments, a 3′-end wing comprises a modified internucleotidic linkages preceded by one or more consecutive natural phosphate linkages in the 3′-end wing. In some embodiments, a 3′-end wing comprises a natural phosphate linkage between the two nucleosides at its 5′-end. For example, a 3′-end wing having the structure of mAmCmUmU*SmC has a natural phosphate linkage between the two nucleosides at its 5′-end (mAmCmUmU*SmC).

[0723] In some embodiments, one or more is one. In some embodiments, one or more is two. In some embodiments, one or more is three. In some embodiments, one or more is four. In some embodiments, one or more is five. In some embodiments, one or more is six. In some embodiments, one or more is seven. In some embodiments, one or more is eight. In some embodiments, one or more is nine. In some embodiments, one or more is ten. In some embodiments, one or more is at least one. In some embodiments, one or more is at least two. In some embodiments, one or more is at least three. In some embodiments, one or more is at least four. In some embodiments, one or more is at least five. In some embodiments, one or more is at least six. In some embodiments, one or more is at least seven. In some embodiments, one or more is at least eight. In some embodiments, one or more is at least nine. In some embodiments, one or more is at least ten.

[0724] In some embodiments, a wing comprises only one chiral internucleotidic linkage. In some embodiments, a 5′-end wing comprises only one chiral internucleotidic linkage. In some embodiments, a 5′-end wing comprises only one chiral internucleotidic linkage at the 5′-end of the wing. In some embodiments, a 5′-end wing comprises only one chiral internucleotidic linkage at the 5′-end of the wing, and the chiral internucleotidic linkage is Rp. In some embodiments, a 5′-end wing comprises only one chiral internucleotidic linkage at the 5′-end of the wing, and the chiral internucleotidic linkage is Sp. In some embodiments, a 3′-end wing comprises only one chiral internucleotidic linkage at the 3′-end of the wing. In some embodiments, a 3′-end wing comprises only one chiral internucleotidic linkage at the 3′-end of the wing, and the chiral internucleotidic linkage is Rp. In some embodiments, a 3′-end wing comprises only one chiral internucleotidic linkage at the 3′-end of the wing, and the chiral internucleotidic linkage is Sp.

[0725] In some embodiments, a wing comprises two or more natural phosphate linkages. In some embodiments, all phosphate linkages within a wing are consecutive, and there are no non-phosphate linkages between any two phosphate linkages within a wing.

[0726] In some embodiments, a linkage connecting a wing and a core is considered part of the core when describing linkages, e.g., linkage chemistry, linkage stereochemistry, etc.

[0727] In some embodiments, a 5′-internucleotidic linkage connected to a sugar moiety without a 2′-modification is a modified linkage. In some embodiments, a 5′-internucleotidic linkage connected to a sugar moiety without a 2′-modification is a linkage having the structure of formula I. In some embodiments, a 5′-internucleotidic linkage connected to a sugar moiety without a 2′-modification is phosphorothioate linkage. In some embodiments, a 5′-internucleotidic linkage connected to a sugar moiety without a 2′-modification is a substituted phosphorothioate linkage. In some embodiments, a 5′-internucleotidic linkage connected to a sugar moiety without a 2′-modification is a phosphorothioate triester linkage. In some embodiments, each 5′-internucleotidic linkage connected to a sugar moiety without a 2′-modification is a modified linkage. In some embodiments, each 5′-internucleotidic linkage connected to a sugar moiety without a 2′-modification is a linkage having the structure of formula I. In some embodiments, each 5′-internucleotidic linkage connected to a sugar moiety without a 2′-modification is phosphorothioate linkage. In some embodiments, each 5′-internucleotidic linkage connected to a sugar moiety without a 2′-modification is a substituted phosphorothioate linkage. In some embodiments, each 5′-internucleotidic linkage connected to a sugar moiety without a 2′-modification is a phosphorothioate triester linkage.

[0728] In some embodiments, a 3′-internucleotidic linkage connected to a sugar moiety without a 2′-modification is a modified linkage. In some embodiments, a 3′-internucleotidic linkage connected to a sugar moiety without a 2′-modification is a linkage having the structure of formula I. In some embodiments, a 3′-internucleotidic linkage connected to a sugar moiety without a 2′-modification is phosphorothioate linkage. In some embodiments, a 3′-internucleotidic linkage connected to a sugar moiety without a 2′-modification is a substituted phosphorothioate linkage. In some embodiments, a 3′-internucleotidic linkage connected to a sugar moiety without a 2′-modification is a phosphorothioate triester linkage. In some embodiments, each 3′-internucleotidic linkage connected to a sugar moiety without a 2′-modification is a modified linkage. In some embodiments, each 3′-internucleotidic linkage connected to a sugar moiety without a 2′-modification is a linkage having the structure of formula I. In some embodiments, each 3′-internucleotidic linkage connected to a sugar moiety without a 2′-modification is phosphorothioate linkage. In some embodiments, each 3′-internucleotidic linkage connected to a sugar moiety without a 2′-modification is a substituted phosphorothioate linkage. In some embodiments, each 3′-internucleotidic linkage connected to a sugar moiety without a 2′-modification is a phosphorothioate triester linkage.

[0729] In some embodiments, both internucleotidic linkages connected to a sugar moiety without a 2′-modification are modified linkages. In some embodiments, both internucleotidic linkages connected to a sugar moiety without a 2′-modification are linkage having the structure of formula I. In some embodiments, both internucleotidic linkages connected to a sugar moiety without a 2′-modification are phosphorothioate linkages. In some embodiments, both internucleotidic linkages connected to a sugar moiety without a 2′-modification are substituted phosphorothioate linkages. In some embodiments, both internucleotidic linkages connected to a sugar moiety without a 2′-modification are phosphorothioate triester linkages. In some embodiments, each internucleotidic linkage connected to a sugar moiety without a 2′-modification is a modified linkage. In some embodiments, each internucleotidic linkage connected to a sugar moiety without a 2′-modification is a linkage having the structure of formula I. In some embodiments, each internucleotidic linkage connected to a sugar moiety without a 2′-modification is phosphorothioate linkage. In some embodiments, each internucleotidic linkage connected to a sugar moiety without a 2′-modification is a substituted phosphorothioate linkage. In some embodiments, each internucleotidic linkage connected to a sugar moiety without a 2′-modification is a phosphorothioate triester linkage.

[0730] In some embodiments, a sugar moiety without a 2′-modification is a sugar moiety found in a natural DNA nucleoside.

[0731] In some embodiments, for a wing-core-wing structure, the 5′-end wing comprises only one chiral internucleotidic linkage. In some embodiments, for a wing-core-wing structure, the 5′-end wing comprises only one chiral internucleotidic linkage at the 5′-end of the wing. In some embodiments, for a wing-core-wing structure, the 3′-end wing comprises only one chiral internucleotidic linkage. In some embodiments, for a wing-core-wing structure, the 3′-end wing comprises only one chiral internucleotidic linkage at the 3′-end of the wing. In some embodiments, for a wing-core-wing structure, each wing comprises only one chiral internucleotidic linkage. In some embodiments, for a wing-core-wing structure, each wing comprises only one chiral internucleotidic linkage, wherein the 5′-end wing comprises only one chiral internucleotidic linkage at its 5′-end; and the 3′-end wing comprises only one chiral internucleotidic linkage at its 3′-end. In some embodiments, the only chiral internucleotidic linkage in the 5′-wing is Rp. In some embodiments, the only chiral internucleotidic linkage in the 5′-wing is Sp. In some embodiments, the only chiral internucleotidic linkage in the 3′-wing is Rp. In some embodiments, the only chiral internucleotidic linkage in the 3′-wing is Sp. In some embodiments, the only chiral internucleotidic linkage in both the 5′- and the 3′-wings are Sp. In some embodiments, the only chiral internucleotidic linkage in both the 5′- and the 3′-wings are Rp. In some embodiments, the only chiral internucleotidic linkage in the 5′-wing is Sp, and the only chiral internucleotidic linkage in the 3′-wing is Rp. In some embodiments, the only chiral internucleotidic linkage in the 5′-wing is Rp, and the only chiral internucleotidic linkage in the 3′-wing is Sp.

[0732] In some embodiments, a wing comprises two chiral internucleotidic linkages. In some embodiments, a wing comprises only two chiral internucleotidic linkages, and one or more natural phosphate linkages. In some embodiments, a wing comprises only two chiral internucleotidic linkages, and two or more natural phosphate linkages. In some embodiments, a wing comprises only two chiral internucleotidic linkages, and two or more consecutive natural phosphate linkages. In some embodiments, a wing comprises only two chiral internucleotidic linkages, and two consecutive natural phosphate linkages. In some embodiments, a wing comprises only two chiral internucleotidic linkages, and three consecutive natural phosphate linkages. In some embodiments, a 5′-wing (to a core) comprises only two chiral internucleotidic linkages, one at its 5′-end and the other at its 3′-end, with one or more natural phosphate linkages in between. In some embodiments, a 5′-wing (to a core) comprises only two chiral internucleotidic linkages, one at its 5′-end and the other at its 3′-end, with two or more natural phosphate linkages in between. In some embodiments, a 3′-wing (to a core) comprises only two chiral internucleotidic linkages, one at its 3′-end and the other at its 3′-end, with one or more natural phosphate linkages in between. In some embodiments, a 3′-wing (to a core) comprises only two chiral internucleotidic linkages, one at its 3′-end and the other at its 3′-end, with two or more natural phosphate linkages in between.

[0733] In some embodiments, a 5′-wing comprises only two chiral internucleotidic linkages, one at its 5′-end and the other at its 3′-end, with one or more natural phosphate linkages in between, and the 3′-wing comprise only one internucleotidic linkage at its 3′-end. In some embodiments, a 5′-wing (to a core) comprises only two chiral internucleotidic linkages, one at its 5′-end and the other at its 3′-end, with two or more natural phosphate linkages in between, and the 3′-wing comprise only one internucleotidic linkage at its 3′-end. In some embodiments, each chiral internucleotidic linkage independently has its own stereochemistry. In some embodiments, both chiral internucleotidic linkages in the 5′-wing have the same stereochemistry. In some embodiments, both chiral internucleotidic linkages in the 5′-wing have different stereochemistry. In some embodiments, both chiral internucleotidic linkages in the 5′-wing are Rp. In some embodiments, both chiral internucleotidic linkages in the 5′-wing are Sp. In some embodiments, chiral internucleotidic linkages in the 5′- and 3′-wings have the same stereochemistry. In some embodiments, chiral internucleotidic linkages in the 5′- and 3′-wings are Rp. In some embodiments, chiral internucleotidic linkages in the 5′- and 3′-wings are Sp. In some embodiments, chiral internucleotidic linkages in the 5′- and 3′-wings have different stereochemistry.

[0734] In some embodiments, a chiral, modified phosphate linkage is a chiral phosphorothioate linkage, i.e., phosphorothioate internucleotidic linkage. In some embodiments, a wing region comprises at least 5%, 10%, 15%, 20%, 25%, 30%, 35%, 40%, 45%, 50%, 55%, 60%, 65%, 70%, 75%, 80%, 85%, 90%, 95%, or 100% chiral phosphorothioate internucleotidic linkages. In some embodiments, all chiral, modified phosphate linkages are chiral phosphorothioate internucleotidic linkages. In some embodiments, at least about 10%, 20%, 30%, 40%, 50%, 60%, 70%, 80%, or 90% chiral phosphorothioate internucleotidic linkages of a wing region are of the Sp conformation. In some embodiments, at least about 10% chiral phosphorothioate internucleotidic linkages of a wing region are of the Sp conformation. In some embodiments, at least about 20% chiral phosphorothioate internucleotidic linkages of a wing region are of the Sp conformation. In some embodiments, at least about 30% chiral phosphorothioate internucleotidic linkages of a wing region are of the Sp conformation. In some embodiments, at least about 40% chiral phosphorothioate internucleotidic linkages of a wing region are of the Sp conformation. In some embodiments, at least about 50% chiral phosphorothioate internucleotidic linkages of a wing region are of the Sp conformation. In some embodiments, at least about 60% chiral phosphorothioate internucleotidic linkages of a wing region are of the Sp conformation. In some embodiments, at least about 70% chiral phosphorothioate internucleotidic linkages of a wing region are of the Sp conformation. In some embodiments, at least about 80% chiral phosphorothioate internucleotidic linkages of a wing region are of the Sp conformation. In some embodiments, at least about 90% chiral phosphorothioate internucleotidic linkages of a wing region are of the Sp conformation. In some embodiments, at least about 95% chiral phosphorothioate internucleotidic linkages of a wing region are of the Sp conformation.

[0735] In some embodiments, at least about 1 chiral phosphorothioate internucleotidic linkage of a wing region is of the Sp conformation. In some embodiments, at least about 2 chiral phosphorothioate internucleotidic linkages of a wing region are of the Sp conformation. In some embodiments, at least about 3 chiral phosphorothioate internucleotidic linkages of a wing region are of the Sp conformation. In some embodiments, at least about 4 chiral phosphorothioate internucleotidic linkages of a wing region are of the Sp conformation. In some embodiments, at least about 5 chiral phosphorothioate internucleotidic linkages of a wing region are of the Sp conformation. In some embodiments, at least about 6 chiral phosphorothioate internucleotidic linkages of a wing region are of the Sp conformation. In some embodiments, at least about 7 chiral phosphorothioate internucleotidic linkages of a wing region are of the Sp conformation. In some embodiments, at least about 8 chiral phosphorothioate internucleotidic linkages of a wing region are of the Sp conformation. In some embodiments, at least about 9 chiral phosphorothioate internucleotidic linkages of a wing region are of the Sp conformation.

[0736] In some embodiments, at least about 2 consecutive chiral phosphorothioate internucleotidic linkages of a wing region are of the Sp conformation. In some embodiments, at least about 3 consecutive chiral phosphorothioate internucleotidic linkages of a wing region are of the Sp conformation. In some embodiments, at least about 4 consecutive chiral phosphorothioate internucleotidic linkages of a wing region are of the Sp conformation. In some embodiments, at least about 5 consecutive chiral phosphorothioate internucleotidic linkages of a wing region are of the Sp conformation. In some embodiments, at least about 6 consecutive chiral phosphorothioate internucleotidic linkages of a wing region are of the Sp conformation. In some embodiments, at least about 7 consecutive chiral phosphorothioate internucleotidic linkages of a wing region are of the Sp conformation. In some embodiments, at least about 8 consecutive chiral phosphorothioate internucleotidic linkages of a wing region are of the Sp conformation. In some embodiments, at least about 9 consecutive chiral phosphorothioate internucleotidic linkages of a wing region are of the Sp conformation.

[0737] In some embodiments, at least about 10%, 20%, 30%, 40%, 50%, 60%, 70%, 80%, or 90% chiral phosphorothioate internucleotidic linkages of a wing region are of the Rp conformation. In some embodiments, at least about 10% chiral phosphorothioate internucleotidic linkages of a wing region are of the Rp conformation. In some embodiments, at least about 20% chiral phosphorothioate internucleotidic linkages of a wing region are of the Rp conformation. In some embodiments, at least about 30% chiral phosphorothioate internucleotidic linkages of a wing region are of the Rp conformation. In some embodiments, at least about 40% chiral phosphorothioate internucleotidic linkages of a wing region are of the Rp conformation. In some embodiments, at least about 50% chiral phosphorothioate internucleotidic linkages of a wing region are of the Rp conformation. In some embodiments, at least about 60% chiral phosphorothioate internucleotidic linkages of a wing region are of the Rp conformation. In some embodiments, at least about 70% chiral phosphorothioate internucleotidic linkages of a wing region are of the Rp conformation. In some embodiments, at least about 80% chiral phosphorothioate internucleotidic linkages of a wing region are of the Rp conformation. In some embodiments, at least about 90% chiral phosphorothioate internucleotidic linkages of a wing region are of the Rp conformation. In some embodiments, at least about 95% chiral phosphorothioate internucleotidic linkages of a wing region are of the Rp conformation.

[0738] In some embodiments, less than about 10%, 20%, 30%, 40%, 50%, 60%, 70%, 80%, or 90% chiral phosphorothioate internucleotidic linkages of a wing region are of the Rp conformation. In some embodiments, less than about 10% chiral phosphorothioate internucleotidic linkages of a wing region are of the Rp conformation. In some embodiments, less than about 20% chiral phosphorothioate internucleotidic linkages of a wing region are of the Rp conformation. In some embodiments, less than about 30% chiral phosphorothioate internucleotidic linkages of a wing region are of the Rp conformation. In some embodiments, less than about 40% chiral phosphorothioate internucleotidic linkages of a wing region are of the Rp conformation. In some embodiments, less than about 50% chiral phosphorothioate internucleotidic linkages of a wing region are of the Rp conformation. In some embodiments, less than about 60% chiral phosphorothioate internucleotidic linkages of a wing region are of the Rp conformation. In some embodiments, less than about 70% chiral phosphorothioate internucleotidic linkages of a wing region are of the Rp conformation. In some embodiments, less than about 80% chiral phosphorothioate internucleotidic linkages of a wing region are of the Rp conformation. In some embodiments, less than about 90% chiral phosphorothioate internucleotidic linkages of a wing region are of the Rp conformation. In some embodiments, less than about 95% chiral phosphorothioate internucleotidic linkages of a wing region are of the Rp conformation. In some embodiments, a wing region has only one Rp chiral phosphorothioate internucleotidic linkages. In some embodiments, a wing region has only one Rp chiral phosphorothioate internucleotidic linkages, wherein all internucleotide linkages are chiral phosphorothioate internucleotidic linkages.

[0739] In some embodiments, at least about 1 chiral phosphorothioate internucleotidic linkage of a wing region is of the Rp conformation. In some embodiments, at least about 2 chiral phosphorothioate internucleotidic linkages of a wing region are of the Rp conformation. In some embodiments, at least about 3 chiral phosphorothioate internucleotidic linkages of a wing region are of the Rp conformation. In some embodiments, at least about 4 chiral phosphorothioate internucleotidic linkages of a wing region are of the Rp conformation. In some embodiments, at least about 5 chiral phosphorothioate internucleotidic linkages of a wing region are of the Rp conformation. In some embodiments, at least about 6 chiral phosphorothioate internucleotidic linkages of a wing region are of the Rp conformation. In some embodiments, at least about 7 chiral phosphorothioate internucleotidic linkages of a wing region are of the Rp conformation. In some embodiments, at least about 8 chiral phosphorothioate internucleotidic linkages of a wing region are of the Rp conformation. In some embodiments, at least about 9 chiral phosphorothioate internucleotidic linkages of a wing region are of the Rp conformation.

[0740] In some embodiments, at least about 2 consecutive chiral phosphorothioate internucleotidic linkages of a wing region are of the Rp conformation. In some embodiments, at least about 3 consecutive chiral phosphorothioate internucleotidic linkages of a wing region are of the Rp conformation. In some embodiments, at least about 4 consecutive chiral phosphorothioate internucleotidic linkages of a wing region are of the Rp conformation. In some embodiments, at least about 5 consecutive chiral phosphorothioate internucleotidic linkages of a wing region are of the Rp conformation. In some embodiments, at least about 6 consecutive chiral phosphorothioate internucleotidic linkages of a wing region are of the Rp conformation. In some embodiments, at least about 7 consecutive chiral phosphorothioate internucleotidic linkages of a wing region are of the Rp conformation. In some embodiments, at least about 8 consecutive chiral phosphorothioate internucleotidic linkages of a wing region are of the Rp conformation. In some embodiments, at least about 9 consecutive chiral phosphorothioate internucleotidic linkages of a wing region are of the Rp conformation.

[0741] In some embodiments, a wing comprises one or more modified sugar moieties. In some embodiments, a wing comprises two or more modified sugar moieties. In some embodiments, a wing comprises three or more modified sugar moieties. In some embodiments, a wing comprises four or more modified sugar moieties. In some embodiments, a wing comprises five or more modified sugar moieties. In some embodiments, a wing comprises six or more modified sugar moieties. In some embodiments, a wing comprises seven or more modified sugar moieties. In some embodiments, a wing comprises eight or more modified sugar moieties. In some embodiments, a wing comprises nine or more modified sugar moieties. In some embodiments, a wing comprises ten or more modified sugar moieties. In some embodiments, a wing comprises 11 or more modified sugar moieties. In some embodiments, a wing comprises 12 or more modified sugar moieties. In some embodiments, a wing comprises 13 or more modified sugar moieties. In some embodiments, a wing comprises 14 or more modified sugar moieties. In some embodiments, a wing comprises 15 or more modified sugar moieties. In some embodiments, a wing comprises 16 or more modified sugar moieties. In some embodiments, a wing comprises 17 or more modified sugar moieties. In some embodiments, a wing comprises 18 or more modified sugar moieties. In some embodiments, a wing comprises 19 or more modified sugar moieties. In some embodiments, a wing comprises 20 or more modified sugar moieties. In some embodiments, a wing comprises 21 or more modified sugar moieties. In some embodiments, a wing comprises 22 or more modified sugar moieties. In some embodiments, a wing comprises 23 or more modified sugar moieties. In some embodiments, a wing comprises 24 or more modified sugar moieties. In some embodiments, a wing comprises 25 or more modified sugar moieties. In some embodiments, a wing comprises 30 or more modified sugar moieties. In some embodiments, a wing comprises 35 or more modified sugar moieties.

[0742] In some embodiments, a wing comprises one or more 2′-modified sugar moieties. In some embodiments, a wing comprises two or more 2′-modified sugar moieties. In some embodiments, a wing comprises three or more 2′-modified sugar moieties. In some embodiments, a wing comprises four or more 2′-modified sugar moieties. In some embodiments, a wing comprises five or more 2′-modified sugar moieties. In some embodiments, a wing comprises six or more 2′-modified sugar moieties. In some embodiments, a wing comprises seven or more 2′-modified sugar moieties. In some embodiments, a wing comprises eight or more 2′-modified sugar moieties. In some embodiments, a wing comprises nine or more 2′-modified sugar moieties. In some embodiments, a wing comprises ten or more 2′-modified sugar moieties. In some embodiments, a wing comprises 11 or more 2′-modified sugar moieties. In some embodiments, a wing comprises 12 or more 2′-modified sugar moieties. In some embodiments, a wing comprises 13 or more 2′-modified sugar moieties. In some embodiments, a wing comprises 14 or more 2′-modified sugar moieties. In some embodiments, a wing comprises 15 or more 2′-modified sugar moieties. In some embodiments, a wing comprises 16 or more 2′-modified sugar moieties. In some embodiments, a wing comprises 17 or more 2′-modified sugar moieties. In some embodiments, a wing comprises 18 or more 2′-modified sugar moieties. In some embodiments, a wing comprises 19 or more 2′-modified sugar moieties. In some embodiments, a wing comprises 20 or more 2′-modified sugar moieties. In some embodiments, a wing comprises 21 or more 2′-modified sugar moieties. In some embodiments, a wing comprises 22 or more 2′-modified sugar moieties. In some embodiments, a wing comprises 23 or more 2′-modified sugar moieties. In some embodiments, a wing comprises 24 or more 2′-modified sugar moieties. In some embodiments, a wing comprises 25 or more 2′-modified sugar moieties. In some embodiments, a wing comprises 30 or more 2′-modified sugar moieties. In some embodiments, a wing comprises 35 or more 2′-modified sugar moieties.

[0743] In some embodiments, a wing comprises one or more 2′-F. In some embodiments, a wing comprises two or more 2′-F. In some embodiments, a wing comprises three or more 2′-F. In some embodiments, a wing comprises four or more 2′-F. In some embodiments, a wing comprises five or more 2′-F. In some embodiments, a wing comprises six or more 2′-F. In some embodiments, a wing comprises seven or more 2′-F. In some embodiments, a wing comprises eight or more 2′-F. In some embodiments, a wing comprises nine or more 2′-F. In some embodiments, a wing comprises ten or more 2′-F. In some embodiments, a wing comprises 11 or more 2′-F. In some embodiments, a wing comprises 12 or more 2′-F. In some embodiments, a wing comprises 13 or more 2′-F. In some embodiments, a wing comprises 14 or more 2′-F. In some embodiments, a wing comprises 15 or more 2′-F. In some embodiments, a wing comprises 16 or more 2′-F. In some embodiments, a wing comprises 17 or more 2′-F. In some embodiments, a wing comprises 18 or more 2′-F. In some embodiments, a wing comprises 19 or more 2′-F. In some embodiments, a wing comprises 20 or more 2′-F. In some embodiments, a wing comprises 21 or more 2′-F. In some embodiments, a wing comprises 22 or more 2′-F. In some embodiments, a wing comprises 23 or more 2′-F. In some embodiments, a wing comprises 24 or more 2′-F. In some embodiments, a wing comprises 25 or more 2′-F. In some embodiments, a wing comprises 30 or more 2′-F. In some embodiments, a wing comprises 35 or more 2′-F.

[0744] In some embodiments, a wing comprises one 2′-F. In some embodiments, a wing comprises two 2′-F. In some embodiments, a wing comprises three 2′-F. In some embodiments, a wing comprises four 2′-F. In some embodiments, a wing comprises five 2′-F. In some embodiments, a wing comprises six 2′-F. In some embodiments, a wing comprises seven 2′-F. In some embodiments, a wing comprises eight 2′-F. In some embodiments, a wing comprises nine 2′-F. In some embodiments, a wing comprises ten 2′-F. In some embodiments, a wing comprises 11 2′-F. In some embodiments, a wing comprises 12 2′-F. In some embodiments, a wing comprises 13 2′-F. In some embodiments, a wing comprises 14 2′-F. In some embodiments, a wing comprises 15 2′-F. In some embodiments, a wing comprises 16 2′-F. In some embodiments, a wing comprises 17 2′-F. In some embodiments, a wing comprises 18 2′-F. In some embodiments, a wing comprises 19 2′-F. In some embodiments, a wing comprises 20 2′-F. In some embodiments, a wing comprises 21 2′-F. In some embodiments, a wing comprises 22 2′-F. In some embodiments, a wing comprises 23 2′-F. In some embodiments, a wing comprises 24 2′—F. In some embodiments, a wing comprises 25 2′-F. In some embodiments, a wing comprises 30 2′-F. In some embodiments, a wing comprises 35 2′-F.

[0745] In some embodiments, a wing comprises one or more consecutive 2′-F. In some embodiments, a wing comprises two or more consecutive 2′-F. In some embodiments, a wing comprises three or more consecutive 2′-F. In some embodiments, a wing comprises four or more consecutive 2′-F. In some embodiments, a wing comprises five or more consecutive 2′-F. In some embodiments, a wing comprises six or more consecutive 2′-F. In some embodiments, a wing comprises seven or more consecutive 2′-F. In some embodiments, a wing comprises eight or more consecutive 2′-F. In some embodiments, a wing comprises nine or more consecutive 2′-F. In some embodiments, a wing comprises ten or more consecutive 2′-F. In some embodiments, a wing comprises 11 or more consecutive 2′-F. In some embodiments, a wing comprises 12 or more consecutive 2′-F. In some embodiments, a wing comprises 13 or more consecutive 2′-F. In some embodiments, a wing comprises 14 or more consecutive 2′-F. In some embodiments, a wing comprises 15 or more consecutive 2′-F. In some embodiments, a wing comprises 16 or more consecutive 2′-F. In some embodiments, a wing comprises 17 or more consecutive 2′-F. In some embodiments, a wing comprises 18 or more consecutive 2′-F. In some embodiments, a wing comprises 19 or more consecutive 2′-F. In some embodiments, a wing comprises 20 or more consecutive 2′-F. In some embodiments, a wing comprises 21 or more consecutive 2′-F. In some embodiments, a wing comprises 22 or more consecutive 2′-F. In some embodiments, a wing comprises 23 or more consecutive 2′-F. In some embodiments, a wing comprises 24 or more consecutive 2′-F. In some embodiments, a wing comprises 25 or more consecutive 2′-F. In some embodiments, a wing comprises 30 or more consecutive 2′-F. In some embodiments, a wing comprises 35 or more consecutive 2′-F.

[0746] In some embodiments, a wing comprises one consecutive 2′-F. In some embodiments, a wing comprises two consecutive 2′-F. In some embodiments, a wing comprises three consecutive 2′-F. In some embodiments, a wing comprises four consecutive 2′-F. In some embodiments, a wing comprises five consecutive 2′-F. In some embodiments, a wing comprises six consecutive 2′-F. In some embodiments, a wing comprises seven consecutive 2′-F. In some embodiments, a wing comprises eight consecutive 2′-F. In some embodiments, a wing comprises nine consecutive 2′-F. In some embodiments, a wing comprises ten consecutive 2′-F. In some embodiments, a wing comprises 11 consecutive 2′-F. In some embodiments, a wing comprises 12 consecutive 2′-F. In some embodiments, a wing comprises 13 consecutive 2′-F. In some embodiments, a wing comprises 14 consecutive 2′-F. In some embodiments, a wing comprises 15 consecutive 2′-F. In some embodiments, a wing comprises 16 consecutive 2′-F. In some embodiments, a wing comprises 17 consecutive 2′-F. In some embodiments, a wing comprises 18 consecutive 2′-F. In some embodiments, a wing comprises 19 consecutive 2′-F. In some embodiments, a wing comprises 20 consecutive 2′-F. In some embodiments, a wing comprises 21 consecutive 2′-F. In some embodiments, a wing comprises 22 consecutive 2′-F. In some embodiments, a wing comprises 23 consecutive 2′-F. In some embodiments, a wing comprises 24 consecutive 2′-F. In some embodiments, a wing comprises 25 consecutive 2′-F. In some embodiments, a wing comprises 30 consecutive 2′-F. In some embodiments, a wing comprises 35 consecutive 2′-F.

[0747] In some embodiments, a core region has a length of one or more bases. In some embodiments, a core region has a length of two or more bases. In some embodiments, a core region has a length of three or more bases. In some embodiments, a core region has a length of four or more bases. In some embodiments, a core region has a length of five or more bases. In some embodiments, a core region has a length of six or more bases. In some embodiments, a core region has a length of seven or more bases. In some embodiments, a core region has a length of eight or more bases. In some embodiments, a core region has a length of nine or more bases. In some embodiments, a core region has a length of ten or more bases. In some embodiments, a core region has a length of 11, 12, 13, 14, 15, 16, 17, 18, 19, 20, 25, or more bases. In certain embodiments, a core region has a length of 11 or more bases. In certain embodiments, a core region has a length of 12 or more bases. In certain embodiments, a core region has a length of 13 or more bases. In certain embodiments, a core region has a length of 14 or more bases. In certain embodiments, a core region has a length of 15 or more bases. In certain embodiments, a core region has a length of 16 or more bases. In certain embodiments, a core region has a length of 17 or more bases. In certain embodiments, a core region has a length of 18 or more bases. In certain embodiments, a core region has a length of 19 or more bases. In certain embodiments, a core region has a length of 20 or more bases. In certain embodiments, a core region has a length of more than 20 bases. In certain embodiments, a core region has a length of 2 bases. In certain embodiments, a core region has a length of 3 bases. In certain embodiments, a core region has a length of 4 bases. In certain embodiments, a core region has a length of 5 bases. In certain embodiments, a core region has a length of 6 bases. In certain embodiments, a core region has a length of 7 bases. In certain embodiments, a core region has a length of 8 bases. In certain embodiments, a core region has a length of 9 bases. In certain embodiments, a core region has a length of 10 bases. In certain embodiments, a core region has a length of 11 bases. In certain embodiments, a core region has a length of 12 bases. In certain embodiments, a core region has a length of 13 bases. In certain embodiments, a core region has a length of 14 bases. In certain embodiments, a core region has a length of 15 bases. In certain embodiments, a core region has a length of 16 bases. In certain embodiments, a core region has a length of 17 bases. In certain embodiments, a core region has a length of 18 bases. In certain embodiments, a core region has a length of 19 bases. In certain embodiments, a core region has a length of 20 bases.

[0748] In some embodiments, a core comprises one or more modified internucleotidic linkages. In some embodiments, a core comprises one or more natural phosphate linkages. In some embodiments, a core independently comprises one or more modified internucleotidic linkages and one or more natural phosphate linkages. In some embodiments, a core comprises no natural phosphate linkages. In some embodiments, each core linkage is a modified internucleotidic linkage.

[0749] In some embodiments, a core comprises at least one natural phosphate linkage. In some embodiments, a core comprises at least two modified internucleotidic linkages. In some embodiments, a core comprises at least three modified internucleotidic linkages. In some embodiments, a core comprises at least four modified internucleotidic linkages. In some embodiments, a core comprises at least five modified internucleotidic linkages. In some embodiments, a core comprises at least six modified internucleotidic linkages. In some embodiments, a core comprises at least seven modified internucleotidic linkages. In some embodiments, a core comprises at least eight modified internucleotidic linkages. In some embodiments, a core comprises at least nine modified internucleotidic linkages. In some embodiments, a core comprises at least ten modified internucleotidic linkages. In some embodiments, a core comprises at least 11 modified internucleotidic linkages. In some embodiments, a core comprises at least 12 modified internucleotidic linkages. In some embodiments, a core comprises at least 13 modified internucleotidic linkages. In some embodiments, a core comprises at least 14 modified internucleotidic linkages. In some embodiments, a core comprises at least 15 modified internucleotidic linkages. In some embodiments, a core comprises at least 16 modified internucleotidic linkages. In some embodiments, a core comprises at least 17 modified internucleotidic linkages. In some embodiments, a core comprises at least 18 modified internucleotidic linkages. In some embodiments, a core comprises at least 19 modified internucleotidic linkages. In some embodiments, a core comprises at least 20 modified internucleotidic linkages.

[0750] In some embodiments, a core comprises one or more chiral internucleotidic linkages. In some embodiments, a core comprises one or more natural phosphate linkages. In some embodiments, a core independently comprises one or more chiral internucleotidic linkages and one or more natural phosphate linkages. In some embodiments, a core comprises no natural phosphate linkages. In some embodiments, each core linkage is a chiral internucleotidic linkage.

[0751] In some embodiments, a core comprises at least one natural phosphate linkage. In some embodiments, a core comprises at least two chiral internucleotidic linkages. In some embodiments, a core comprises at least three chiral internucleotidic linkages. In some embodiments, a core comprises at least four chiral internucleotidic linkages. In some embodiments, a core comprises at least five chiral internucleotidic linkages. In some embodiments, a core comprises at least six chiral internucleotidic linkages. In some embodiments, a core comprises at least seven chiral internucleotidic linkages. In some embodiments, a core comprises at least eight chiral internucleotidic linkages. In some embodiments, a core comprises at least nine chiral internucleotidic linkages. In some embodiments, a core comprises at least ten chiral internucleotidic linkages. In some embodiments, a core comprises at least 11 chiral internucleotidic linkages. In some embodiments, a core comprises at least 12 chiral internucleotidic linkages. In some embodiments, a core comprises at least 13 chiral internucleotidic linkages. In some embodiments, a core comprises at least 14 chiral internucleotidic linkages. In some embodiments, a core comprises at least 15 chiral internucleotidic linkages. In some embodiments, a core comprises at least 16 chiral internucleotidic linkages. In some embodiments, a core comprises at least 17 chiral internucleotidic linkages. In some embodiments, a core comprises at least 18 chiral internucleotidic linkages. In some embodiments, a core comprises at least 19 chiral internucleotidic linkages. In some embodiments, a core comprises at least 20 chiral internucleotidic linkages.

[0752] In some embodiments, a core comprises one natural phosphate linkage. In some embodiments, a core comprises two chiral internucleotidic linkages. In some embodiments, a core comprises three chiral internucleotidic linkages. In some embodiments, a core comprises four chiral internucleotidic linkages. In some embodiments, a core comprises five chiral internucleotidic linkages. In some embodiments, a core comprises six chiral internucleotidic linkages. In some embodiments, a core comprises seven chiral internucleotidic linkages. In some embodiments, a core comprises eight chiral internucleotidic linkages. In some embodiments, a core comprises nine chiral internucleotidic linkages. In some embodiments, a core comprises ten chiral internucleotidic linkages. In some embodiments, a core comprises 11 chiral internucleotidic linkages. In some embodiments, a core comprises 12 chiral internucleotidic linkages. In some embodiments, a core comprises 13 chiral internucleotidic linkages. In some embodiments, a core comprises 14 chiral internucleotidic linkages. In some embodiments, a core comprises 15 chiral internucleotidic linkages. In some embodiments, a core comprises 16 chiral internucleotidic linkages. In some embodiments, a core comprises 17 chiral internucleotidic linkages. In some embodiments, a core comprises 18 chiral internucleotidic linkages. In some embodiments, a core comprises 19 chiral internucleotidic linkages. In some embodiments, a core comprises 20 chiral internucleotidic linkages.

[0753] In some embodiments, a core region has a pattern of backbone chiral centers comprising (Sp)m(Rp)n, (Rp)n(Sp)m, (Np)t(Rp)n(Sp)m, or (Sp)t(Rp)n(Sp)m, wherein each of m, n, t and Np is independently as defined and described in the present disclosure. In some embodiments, a core region has a pattern of backbone chiral centers comprising (Sp)m(Rp)n, (Rp)n(Sp)m, (Np)t(Rp)n(Sp)m, or (Sp)t(Rp)n(Sp)m. In some embodiments, a core region has a pattern of backbone chiral centers comprising (Sp)m(Rp)n. In some embodiments, a core region has a pattern of backbone chiral centers comprising (Sp)m(Rp)n, wherein m >2 and n is 1. In some embodiments, a core region has a pattern of backbone chiral centers comprising (Rp)n(Sp)m. In some embodiments, a core region has a pattern of backbone chiral centers comprising (Rp)n(Sp)m, wherein m >2 and n is 1. In some embodiments, a core region has a pattern of backbone chiral centers comprising (Np)t(Rp)n(Sp)m. In some embodiments, a core region has a pattern of backbone chiral centers comprising (Np)t(Rp)n(Sp)m, wherein m >2 and n is 1. In some embodiments, a core region has a pattern of backbone chiral centers comprising (Np)t(Rp)n(Sp)m, wherein t >2, m >2 and n is 1. In some embodiments, a core region has a pattern of backbone chiral centers comprising (Sp)t(Rp)n(Sp)m. In some embodiments, a core region has a pattern of backbone chiral centers comprising (Sp)t(Rp)n(Sp)m, wherein m >2 and n is 1. In some embodiments, a core region has a pattern of backbone chiral centers comprising (Sp)t(Rp)n(Sp)m, wherein t >2, m >2 and n is 1. Among other things, the present disclosure demonstrates that, in some embodiments, such patterns can provide and/or enhance controlled cleavage, improved cleavage rate, selectivity, etc., of a target sequence, e.g., an RNA sequence. Example patterns of backbone chiral centers are described in the present disclosure.

[0754] In some embodiments, at least 60% of the chiral internucleotidic linkages in the core region are Sp. In some embodiments, at least 65% of the chiral internucleotidic linkages in the core region are Sp. In some embodiments, at least 66% of the chiral internucleotidic linkages in the core region are Sp. In some embodiments, at least 67% of the chiral internucleotidic linkages in the core region are Sp. In some embodiments, at least 70% of the chiral internucleotidic linkages in the core region are Sp. In some embodiments, at least 75% of the chiral internucleotidic linkages in the core region are Sp. In some embodiments, at least 80% of the chiral internucleotidic linkages in the core region are Sp. In some embodiments, at least 85% of the chiral internucleotidic linkages in the core region are Sp. In some embodiments, at least 90% of the chiral internucleotidic linkages in the core region are Sp. In some embodiments, at least 95% of the chiral internucleotidic linkages in the core region are Sp. In some embodiments, each chiral internucleotidic linkages in the core region is Sp.

[0755] In some embodiments, at least 1 core region internucleotidic linkage is Sp. In some embodiments, at least 2 core region internucleotidic linkages are Sp. In some embodiments, at least 3 core region internucleotidic linkages are Sp. In some embodiments, at least 4 core region internucleotidic linkages are Sp. In some embodiments, at least 5 core region internucleotidic linkages are Sp. In some embodiments, at least 6 core region internucleotidic linkages are Sp. In some embodiments, at least 7 core region internucleotidic linkages are Sp. In some embodiments, at least 8 core region internucleotidic linkages are Sp. In some embodiments, at least 9 core region internucleotidic linkages are Sp. In some embodiments, at least 10 core region internucleotidic linkages are Sp. In some embodiments, at least 11 core region internucleotidic linkages are Sp. In some embodiments, at least 12 core region internucleotidic linkages are Sp. In some embodiments, at least 13 core region internucleotidic linkages are Sp. In some embodiments, at least 14 core region internucleotidic linkages are Sp. In some embodiments, at least 15 core region internucleotidic linkages are Sp. In some embodiments, at least 16 core region internucleotidic linkages are Sp. In some embodiments, at least 17 core region internucleotidic linkages are Sp. In some embodiments, at least 18 core region internucleotidic linkages are Sp. In some embodiments, at least 19 core region internucleotidic linkages are Sp. In some embodiments, at least 20 core region internucleotidic linkages are Sp. In some embodiments, at least 21 core region internucleotidic linkages are Sp. In some embodiments, at least two core region internucleotidic linkages are Sp. In some embodiments, the Sp internucleotidic linkages are consecutive.

[0756] In some embodiments, at least 60% of the chiral internucleotidic linkages in the core region are Rp. In some embodiments, at least 65% of the chiral internucleotidic linkages in the core region are Rp. In some embodiments, at least 66% of the chiral internucleotidic linkages in the core region are Rp. In some embodiments, at least 67% of the chiral internucleotidic linkages in the core region are Rp. In some embodiments, at least 70% of the chiral internucleotidic linkages in the core region are Rp. In some embodiments, at least 75% of the chiral internucleotidic linkages in the core region are Rp. In some embodiments, at least 80% of the chiral internucleotidic linkages in the core region are Rp. In some embodiments, at least 85% of the chiral internucleotidic linkages in the core region are Rp. In some embodiments In some embodiments, each chiral internucleotidic linkages in the core region is Rp.

[0757] In some embodiments, at least 1 core region internucleotidic linkage is Rp. In some embodiments, at least 2 core region internucleotidic linkages are Rp. In some embodiments, at least 3 core region internucleotidic linkages are Rp. In some embodiments, at least 4 core region internucleotidic linkages are Rp. In some embodiments, at least 5 core region internucleotidic linkages are Rp. In some embodiments, at least 6 core region internucleotidic linkages are Rp. In some embodiments, at least 7 core region internucleotidic linkages are Rp. In some embodiments, at least 8 core region internucleotidic linkages are Rp. In some embodiments, at least 9 core region internucleotidic linkages are Rp. In some embodiments, at least 10 core region internucleotidic linkages are Rp. In some embodiments, at least 11 core region internucleotidic linkages are Rp. In some embodiments, at least 12 core region internucleotidic linkages are Rp. In some embodiments, at least 13 core region internucleotidic linkages are Rp. In some embodiments, at least 14 core region internucleotidic linkages are Rp. In some embodiments, at least 15 core region internucleotidic linkages are Rp. In some embodiments, at least 16 core region internucleotidic linkages are Rp. In some embodiments, at least 17 core region internucleotidic linkages are Rp. In some embodiments, at least 18 core region internucleotidic linkages are Rp. In some embodiments, at least 19 core region internucleotidic linkages are Rp. In some embodiments, at least 20 core region internucleotidic linkages are Rp. In some embodiments, at least 21 core region internucleotidic linkages are Rp. In some embodiments, at least two core region internucleotidic linkages are Rp. In some embodiments, the Rp internucleotidic linkages are consecutive.

[0758] In some embodiments, a core comprises one or more modified sugar moieties. In some embodiments, a core comprises two or more modified sugar moieties. In some embodiments, a core comprises three or more modified sugar moieties. In some embodiments, a core comprises four or more modified sugar moieties. In some embodiments, a core comprises five or more modified sugar moieties. In some embodiments, a core comprises six or more modified sugar moieties. In some embodiments, a core comprises seven or more modified sugar moieties. In some embodiments, a core comprises eight or more modified sugar moieties. In some embodiments, a core comprises nine or more modified sugar moieties. In some embodiments, a core comprises ten or more modified sugar moieties. In some embodiments, a core comprises 11 or more modified sugar moieties. In some embodiments, a core comprises 12 or more modified sugar moieties. In some embodiments, a core comprises 13 or more modified sugar moieties. In some embodiments, a core comprises 14 or more modified sugar moieties. In some embodiments, a core comprises 15 or more modified sugar moieties. In some embodiments, a core comprises 16 or more modified sugar moieties. In some embodiments, a core comprises 17 or more modified sugar moieties. In some embodiments, a core comprises 18 or more modified sugar moieties. In some embodiments, a core comprises 19 or more modified sugar moieties. In some embodiments, a core comprises 20 or more modified sugar moieties. In some embodiments, a core comprises 21 or more modified sugar moieties. In some embodiments, a core comprises 22 or more modified sugar moieties. In some embodiments, a core comprises 23 or more modified sugar moieties. In some embodiments, a core comprises 24 or more modified sugar moieties. In some embodiments, a core comprises 25 or more modified sugar moieties. In some embodiments, a core comprises 30 or more modified sugar moieties. In some embodiments, a core comprises 35 or more modified sugar moieties. In some embodiments, a 2′-modification is 2′-OR¹. In some embodiments, a 2′-modification is 2′-OMe.

[0759] In some embodiments, a core comprises one or more 2′-modified sugar moieties. In some embodiments, a core comprises two or more 2′-modified sugar moieties. In some embodiments, a core comprises three or more 2′-modified sugar moieties. In some embodiments, a core comprises four or more 2′-modified sugar moieties. In some embodiments, a core comprises five or more 2′-modified sugar moieties. In some embodiments, a core comprises six or more 2′-modified sugar moieties. In some embodiments, a core comprises seven or more 2′-modified sugar moieties. In some embodiments, a core comprises eight or more 2′-modified sugar moieties. In some embodiments, a core comprises nine or more 2′-modified sugar moieties. In some embodiments, a core comprises ten or more 2′-modified sugar moieties. In some embodiments, a core comprises 11 or more 2′-modified sugar moieties. In some embodiments, a core comprises 12 or more 2′-modified sugar moieties. In some embodiments, a core comprises 13 or more 2′-modified sugar moieties. In some embodiments, a core comprises 14 or more 2′-modified sugar moieties. In some embodiments, a core comprises 15 or more 2′-modified sugar moieties. In some embodiments, a core comprises 16 or more 2′-modified sugar moieties. In some embodiments, a core comprises 17 or more 2′-modified sugar moieties. In some embodiments, a core comprises 18 or more 2′-modified sugar moieties. In some embodiments, a core comprises 19 or more 2′-modified sugar moieties. In some embodiments, a core comprises 20 or more 2′-modified sugar moieties. In some embodiments, a core comprises 21 or more 2′-modified sugar moieties. In some embodiments, a core comprises 22 or more 2′-modified sugar moieties. In some embodiments, a core comprises 23 or more 2′-modified sugar moieties. In some embodiments, a core comprises 24 or more 2′-modified sugar moieties. In some embodiments, a core comprises 25 or more 2′-modified sugar moieties. In some embodiments, a core comprises 30 or more 2′-modified sugar moieties. In some embodiments, a core comprises 35 or more 2′-modified sugar moieties. In some embodiments, a 2′-modification is 2′-OR¹. In some embodiments, a 2′-modification is 2′-OMe.

[0760] In some embodiments, a wing-core-wing (i.e., X-Y-X) motif is represented numerically as, e.g., 5-10-4, meaning the wing to the 5′-end of the core is 5 bases in length, the core region is 10 bases in length, and the wing region to the 3′-end of the core is 4-bases in length. In some embodiments, a wing-core-wing motif is any of, e.g. 2-16-2, 3-14-3, 4-12-4, 5-10-5, 2-9-6, 3-9-3, 3-9-4, 3-9-5, 4-7-4, 4-9-3, 4-9-4, 4-9-5, 4-10-5, 4-11-4, 4-11-5, 5-7-5, 5-8- 6, 8-7-5, 7-7-6, 5-9-3, 5-9-5, 5-10-4, 5-10-5, 6-7-6, 6-8-5, and 6-9-2, etc. In certain embodiments, a wing-core-wing motif is 5-10-5. In certain embodiments, a wing-core-wing motif is 7-7-6. In certain embodiments, a wing-core-wing motif is 8-7-5.

[0761] In some embodiments, a wing-core motif is 5-15, 6-14, 7-13, 8-12, 9-12, etc. In some embodiments, a core-wing motif is 5-15, 6-14, 7-13, 8-12, 9-12, etc.

[0762] In some embodiments, the internucleosidic linkages of provided CpG oligonucleotides of such wing-core-wing (i.e., X-Y-X) motifs are all chiral, modified phosphate linkages. In some embodiments, the internucleosidic linkages of provided CpG oligonucleotides of such wing-core-wing (i.e., X-Y-X) motifs are all chiral phosphorothioate internucleotidic linkages. In some embodiments, chiral internucleotidic linkages of provided CpG oligonucleotides of such wing-core-wing motifs are at least about 10, 20, 30, 40, 50, 50, 70, 80, or 90% chiral, modified phosphate internucleotidic linkages. In some embodiments, chiral internucleotidic linkages of provided CpG oligonucleotides of such wing-core-wing motifs are at least about 10, 20, 30, 40, 50, 60, 70, 80, or 90% chiral phosphorothioate internucleotidic linkages. In some embodiments, chiral internucleotidic linkages of provided CpG oligonucleotides of such wing-core-wing motifs are at least about 10, 20, 30, 40, 50, 50, 70, 80, or 90% chiral phosphorothioate internucleotidic linkages of the Sp conformation.

[0763] In some embodiments, each wing region of a wing-core-wing motif optionally contains chiral, modified phosphate internucleotidic linkages. In some embodiments, each wing region of a wing-core-wing motif optionally contains chiral phosphorothioate internucleotidic linkages. In some embodiments, each wing region of a wing-core-wing motif contains chiral phosphorothioate internucleotidic linkages. In some embodiments, the two wing regions of a wing-core-wing motif have the same internucleotidic linkage stereochemistry. In some embodiments, the two wing regions have different internucleotidic linkage stereochemistry. In some embodiments, each internucleotidic linkage in the wings is independently a chiral internucleotidic linkage.

[0764] In some embodiments, the core region of a wing-core-wing motif optionally contains chiral, modified phosphate internucleotidic linkages. In some embodiments, the core region of a wing-core-wing motif optionally contains chiral phosphorothioate internucleotidic linkages. In some embodiments, the core region of a wing-core-wing motif comprises a repeating pattern of internucleotidic linkage stereochemistry. In some embodiments, the core region of a wing-core-wing motif has a repeating pattern of internucleotidic linkage stereochemistry. In some embodiments, the core region of a wing-core-wing motif comprises repeating pattern of internucleotidic linkage stereochemistry, wherein the repeating pattern is (Sp)mRp or Rp(Sp)m, wherein m is 1-50. In some embodiments, the core region of a wing-core-wing motif comprises repeating pattern of internucleotidic linkage stereochemistry, wherein the repeating pattern is (Sp)mRp or Rp(Sp)m, wherein m is 1-50. In some embodiments, the core region of a wing-core-wing motif comprises repeating pattern of internucleotidic linkage stereochemistry, wherein the repeating pattern is (Sp)mRp, wherein m is 1-50. In some embodiments, the core region of a wing-core-wing motif comprises repeating pattern of internucleotidic linkage stereochemistry, wherein the repeating pattern is Rp(Sp)m, wherein m is 1-50. In some embodiments, the core region of a wing-core-wing motif has repeating pattern of internucleotidic linkage stereochemistry, wherein the repeating pattern is (Sp)mRp or Rp(Sp)m, wherein m is 1-50. In some embodiments, the core region of a wing-core-wing motif has repeating pattern of internucleotidic linkage stereochemistry, wherein the repeating pattern is (Sp)mRp, wherein m is 1-50. In some embodiments, the core region of a wing-core-wing motif has repeating pattern of internucleotidic linkage stereochemistry, wherein the repeating pattern is Rp(Sp)m, wherein m is 1-50. In some embodiments, the core region of a wing-core-wing motif has repeating pattern of internucleotidic linkage stereochemistry, wherein the repeating pattern is a motif comprising at least 33% of internucleotidic linkage in the S conformation. In some embodiments, the core region of a wing-core-wing motif has repeating pattern of internucleotidic linkage stereochemistry, wherein the repeating pattern is a motif comprising at least 50% of internucleotidic linkage in the S conformation. In some embodiments, the core region of a wing-core-wing motif has repeating pattern of internucleotidic linkage stereochemistry, wherein the repeating pattern is a motif comprising at least 66% of internucleotidic linkage in the S conformation. In some embodiments, the core region of a wing-core-wing motif has repeating pattern of internucleotidic linkage stereochemistry, wherein the repeating pattern is a repeating triplet motif selected from RpRpSp and SpSpRp. In some embodiments, the core region of a wing-core-wing motif has repeating pattern of internucleotidic linkage stereochemistry, wherein the repeating pattern is a repeating RpRpSp. In some embodiments, the core region of a wing-core-wing motif has repeating pattern of internucleotidic linkage stereochemistry, wherein the repeating pattern is a repeating SpSpRp.

[0765] In some embodiments, the present disclosure provides a chirally controlled CpG oligonucleotide composition of a CpG oligonucleotide type whose pattern of backbone chiral centers in the core region comprises (Sp)mRp or Rp(Sp)m. In some embodiments, the present disclosure provides a chirally controlled CpG oligonucleotide composition of a CpG oligonucleotide type whose pattern of backbone chiral centers in the core region comprises Rp(Sp)m. In some embodiments, the present disclosure provides a chirally controlled CpG oligonucleotide composition of a CpG oligonucleotide type whose pattern of backbone chiral centers in the core region comprises (Sp)mRp. In some embodiments, m is 2. In some embodiments, the present disclosure provides a chirally controlled CpG oligonucleotide composition of a CpG oligonucleotide type whose pattern of backbone chiral centers in the core region comprises Rp(Sp)₂. In some embodiments, the present disclosure provides a chirally controlled CpG oligonucleotide composition of a CpG oligonucleotide type whose pattern of backbone chiral centers in the core region comprises (Sp)₂Rp(Sp)₂. In some embodiments, the present disclosure provides a chirally controlled CpG oligonucleotide composition of a CpG oligonucleotide type whose pattern of backbone chiral centers in the core region comprises (Rp)₂Rp(Sp)₂. In some embodiments, the present disclosure provides a chirally controlled CpG oligonucleotide composition of a CpG oligonucleotide type whose pattern of backbone chiral centers in the core region comprises RpSpRp(Sp)₂. In some embodiments, the present disclosure provides a chirally controlled CpG oligonucleotide composition of a CpG oligonucleotide type whose pattern of backbone chiral centers in the core region comprises SpRpRp(Sp)₂. In some embodiments, the present disclosure provides a chirally controlled CpG oligonucleotide composition of a CpG oligonucleotide type whose pattern of backbone chiral centers in the core region comprises (Sp)₂Rp.

[0766] In some embodiments, the present disclosure provides a chirally controlled CpG oligonucleotide composition of a CpG oligonucleotide type whose pattern of backbone chiral centers comprises (Sp)mRp or Rp(Sp)m. In some embodiments, the present disclosure provides a chirally controlled CpG oligonucleotide composition of a CpG oligonucleotide type whose pattern of backbone chiral centers comprises Rp(Sp)m. In some embodiments, the present disclosure provides a chirally controlled CpG oligonucleotide composition of a CpG oligonucleotide type whose pattern of backbone chiral centers comprises (Sp)mRp. In some embodiments, m is 2. In some embodiments, the present disclosure provides a chirally controlled CpG oligonucleotide composition of a CpG oligonucleotide type whose pattern of backbone chiral centers comprises Rp(Sp)₂. In some embodiments, the present disclosure provides a chirally controlled CpG oligonucleotide composition of a CpG oligonucleotide type whose pattern of backbone chiral centers comprises (Sp)₂Rp(Sp)₂. In some embodiments, the present disclosure provides a chirally controlled CpG oligonucleotide composition of a CpG oligonucleotide type whose pattern of backbone chiral centers comprises (Rp)₂Rp(Sp)₂. In some embodiments, the present disclosure provides a chirally controlled CpG oligonucleotide composition of a CpG oligonucleotide type whose pattern of backbone chiral centers comprises RpSpRp(Sp)₂. In some embodiments, the present disclosure provides a chirally controlled CpG oligonucleotide composition of a CpG oligonucleotide type whose pattern of backbone chiral centers comprises SpRpRp(Sp)₂. In some embodiments, the present disclosure provides a chirally controlled CpG oligonucleotide composition of a CpG oligonucleotide type whose pattern of backbone chiral centers comprises (Sp)₂Rp.

[0767] As defined herein, m is 1-50. In some embodiments, m is 1. In some embodiments, m is 2-50. In some embodiments, m is 2, 3, 4, 5, 6, 7 or 8. In some embodiments, m is 3, 4, 5, 6, 7 or 8. In some embodiments, m is 4, 5, 6, 7 or 8. In some embodiments, m is 5, 6, 7 or 8. In some embodiments, m is 6, 7 or 8. In some embodiments, m is 7 or 8. In some embodiments, m is 2. In some embodiments, m is 3. In some embodiments, m is 4. In some embodiments, m is 5. In some embodiments, m is 6. In some embodiments, m is 7. In some embodiments, m is 8. In some embodiments, m is 9. In some embodiments, m is 10. In some embodiments, m is 11. In some embodiments, m is 12. In some embodiments, m is 13. In some embodiments, m is 14. In some embodiments, m is 15. In some embodiments, m is 16. In some embodiments, m is 17. In some embodiments, m is 18. In some embodiments, m is 19. In some embodiments, m is 20. In some embodiments, m is 21. In some embodiments, m is 22. In some embodiments, m is 23. In some embodiments, m is 24. In some embodiments, m is 25. In some embodiments, m is greater than 25.

[0768] In some embodiments, a repeating pattern is (Sp)m(Rp)n, wherein n is 1-10, and m is independently as defined above and described herein. In some embodiments, the present disclosure provides a chirally controlled CpG oligonucleotide composition of a CpG oligonucleotide type whose pattern of backbone chiral centers comprises (Sp)m(Rp)n. In some embodiments, the present disclosure provides a chirally controlled CpG oligonucleotide composition of a CpG oligonucleotide type whose pattern of backbone chiral centers in the core region comprises (Sp)m(Rp)n. In some embodiments, a repeating pattern is (Rp)n(Sp)m, wherein n is 1-10, and m is independently as defined above and described herein. In some embodiments, the present disclosure provides a chirally controlled CpG oligonucleotide composition of a CpG oligonucleotide type whose pattern of backbone chiral centers comprises (Rp)n(Sp)m. In some embodiments, the present disclosure provides a chirally controlled CpG oligonucleotide composition of a CpG oligonucleotide type whose pattern of backbone chiral centers in the core region comprises (Rp)n(Sp)m. In some embodiments, (Rp)n(Sp)m is (Rp)(Sp)₂. In some embodiments, (Sp)n(Rp)m is (Sp)₂(Rp).

[0769] In some embodiments, the present disclosure provides a chirally controlled CpG oligonucleotide composition of a CpG oligonucleotide type whose pattern of backbone chiral centers comprises (Sp)m(Rp)n(Sp)t. In some embodiments, a repeating pattern is (Sp)m(Rp)n(Sp)t, wherein n is 1-10, t is 1-50, and m is as defined above and described herein. In some embodiments, the present disclosure provides a chirally controlled CpG oligonucleotide composition of a CpG oligonucleotide type whose pattern of backbone chiral centers in the core region comprises (Sp)m(Rp)n(Sp)t. In some embodiments, a repeating pattern is (Sp)t(Rp)n(Sp)m, wherein n is 1-10, t is 1-50, and m is as defined above and described herein. In some embodiments, the present disclosure provides a chirally controlled CpG oligonucleotide composition of a CpG oligonucleotide type whose pattern of backbone chiral centers comprises (Sp)t(Rp)n(Sp)m. In some embodiments, the present disclosure provides a chirally controlled CpG oligonucleotide composition of a CpG oligonucleotide type whose pattern of backbone chiral centers in the core region comprises (Sp)t(Rp)n(Sp)m.

[0770] In some embodiments, a repeating pattern is (Np)t(Rp)n(Sp)m, wherein n is 1-10, t is 1-50, Np is independently Rp or Sp, and m is as defined above and described herein. In some embodiments, the present disclosure provides a chirally controlled CpG oligonucleotide composition of a CpG oligonucleotide type whose pattern of backbone chiral centers comprises (Np)t(Rp)n(Sp)m. In some embodiments, the present disclosure provides a chirally controlled CpG oligonucleotide composition of a CpG oligonucleotide type whose pattern of backbone chiral centers in the core region comprises (Np)t(Rp)n(Sp)m. In some embodiments, a repeating pattern is (Np)m(Rp)n(Sp)t, wherein n is 1-10, t is 1-50, Np is independently Rp or Sp, and m is as defined above and described herein. In some embodiments, the present disclosure provides a chirally controlled CpG oligonucleotide composition of a CpG oligonucleotide type whose pattern of backbone chiral centers comprises (Np)m(Rp)n(Sp)t. In some embodiments, the present disclosure provides a chirally controlled CpG oligonucleotide composition of a CpG oligonucleotide type whose pattern of backbone chiral centers in the core region comprises (Np)m(Rp)n(Sp)t. In some embodiments, Np is Rp. In some embodiments, Np is Sp. In some embodiments, all Np are the same. In some embodiments, all Np are Sp. In some embodiments, at least one Np is different from the other Np. In some embodiments, t is 2.

[0771] As defined herein, n is 1-10. In some embodiments, n is 1, 2, 3, 4, 5, 6, 7 or 8. In some embodiments, n is 1. In some embodiments, n is 2, 3, 4, 5, 6, 7 or 8. In some embodiments, n is 3, 4, 5, 6, 7 or 8. In some embodiments, n is 4, 5, 6, 7 or 8. In some embodiments, n is 5, 6, 7 or 8. In some embodiments, n is 6, 7 or 8. In some embodiments, n is 7 or 8. In some embodiments, n is 1. In some embodiments, n is 2. In some embodiments, n is 3. In some embodiments, n is 4. In some embodiments, n is 5. In some embodiments, n is 6. In some embodiments, n is 7. In some embodiments, n is 8. In some embodiments, n is 9. In some embodiments, n is 10.

[0772] As defined herein, t is 1-50. In some embodiments, t is 1. In some embodiments, t is 2-50. In some embodiments, t is 2, 3, 4, 5, 6, 7 or 8. In some embodiments, t is 3, 4, 5, 6, 7 or 8. In some embodiments, t is 4, 5, 6, 7 or 8. In some embodiments, t is 5, 6, 7 or 8. In some embodiments, t is 6, 7 or 8. In some embodiments, t is 7 or 8. In some embodiments, t is 2. In some embodiments, t is 3. In some embodiments, t is 4. In some embodiments, t is 5. In some embodiments, t is 6. In some embodiments, t is 7. In some embodiments, t is 8. In some embodiments, t is 9. In some embodiments, t is 10. In some embodiments, t is 11. In some embodiments, t is 12. In some embodiments, t is 13. In some embodiments, t is 14. In some embodiments, t is 15. In some embodiments, t is 16. In some embodiments, t is 17. In some embodiments, t is 18. In some embodiments, t is 19. In some embodiments, t is 20. In some embodiments, t is 21. In some embodiments, t is 22. In some embodiments, t is 23. In some embodiments, t is 24. In some embodiments, t is 25. In some embodiments, t is greater than 25.

[0773] In some embodiments, at least one of m and t is greater than 2. In some embodiments, at least one of m and t is greater than 3. In some embodiments, at least one of m and t is greater than 4. In some embodiments, at least one of m and t is greater than 5. In some embodiments, at least one of m and t is greater than 6. In some embodiments, at least one of m and t is greater than 7. In some embodiments, at least one of m and t is greater than 8. In some embodiments, at least one of m and t is greater than 9. In some embodiments, at least one of m and t is greater than 10. In some embodiments, at least one of m and t is greater than 11. In some embodiments, at least one of m and t is greater than 12. In some embodiments, at least one of m and t is greater than 13. In some embodiments, at least one of m and t is greater than 14. In some embodiments, at least one of m and t is greater than 15. In some embodiments, at least one of m and t is greater than 16. In some embodiments, at least one of m and t is greater than 17. In some embodiments, at least one of m and t is greater than 18. In some embodiments, at least one of m and t is greater than 19. In some embodiments, at least one of m and t is greater than 20. In some embodiments, at least one of m and t is greater than 21. In some embodiments, at least one of m and t is greater than 22. In some embodiments, at least one of m and t is greater than 23. In some embodiments, at least one of m and t is greater than 24. In some embodiments, at least one of m and t is greater than 25.

[0774] In some embodiments, each one of m and t is greater than 2. In some embodiments, each one of m and t is greater than 3. In some embodiments, each one of m and t is greater than 4. In some embodiments, each one of m and t is greater than 5. In some embodiments, each one of m and t is greater than 6. In some embodiments, each one of m and t is greater than 7. In some embodiments, each one of m and t is greater than 8. In some embodiments, each one of m and t is greater than 9. In some embodiments, each one of m and t is greater than 10. In some embodiments, each one of m and t is greater than 11. In some embodiments, each one of m and t is greater than 12. In some embodiments, each one of m and t is greater than 13. In some embodiments, each one of m and t is greater than 14. In some embodiments, each one of m and t is greater than 15. In some embodiments, each one of m and t is greater than 16. In some embodiments, each one of m and t is greater than 17. In some embodiments, each one of m and t is greater than 18. In some embodiments, each one of m and t is greater than 19. In some embodiments, each one of m and t is greater than 20.

[0775] In some embodiments, the sum of m and t is greater than 3. In some embodiments, the sum of m and t is greater than 4. In some embodiments, the sum of m and t is greater than 5. In some embodiments, the sum of m and t is greater than 6. In some embodiments, the sum of m and t is greater than 7. In some embodiments, the sum of m and t is greater than 8. In some embodiments, the sum of m and t is greater than 9. In some embodiments, the sum of m and t is greater than 10. In some embodiments, the sum of m and t is greater than 11. In some embodiments, the sum of m and t is greater than 12. In some embodiments, the sum of m and t is greater than 13. In some embodiments, the sum of m and t is greater than 14. In some embodiments, the sum of m and t is greater than 15. In some embodiments, the sum of m and t is greater than 16. In some embodiments, the sum of m and t is greater than 17. In some embodiments, the sum of m and t is greater than 18. In some embodiments, the sum of m and t is greater than 19. In some embodiments, the sum of m and t is greater than 20. In some embodiments, the sum of m and t is greater than 21. In some embodiments, the sum of m and t is greater than 22. In some embodiments, the sum of m and t is greater than 23. In some embodiments, the sum of m and t is greater than 24. In some embodiments, the sum of m and t is greater than 25.

[0776] In some embodiments, n is 1, and at least one of m and t is greater than 1. In some embodiments, n is 1 and each of m and t is independently greater than 1. In some embodiments, m>n and t>n. In some embodiments, (Sp)m(Rp)n(Sp)t is (Sp)₂Rp(Sp)₂. In some embodiments, (Sp)t(Rp)n(Sp)m is (Sp)₂Rp(Sp)₂. In some embodiments, (Sp)t(Rp)n(Sp)m is SpRp(Sp)₂. In some embodiments, (Np)t(Rp)n(Sp)m is (Np)tRp(Sp)m. In some embodiments, (Np)t(Rp)n(Sp)m is (Np)₂Rp(Sp)m. In some embodiments, (Np)t(Rp)n(Sp)m is (Rp)₂Rp(Sp)m. In some embodiments, (Np)t(Rp)n(Sp)m is (Sp)₂Rp(Sp)m. In some embodiments, (Np)t(Rp)n(Sp)m is RpSpRp(Sp)m. In some embodiments, (Np)t(Rp)n(Sp)m is SpRpRp(Sp)m.

[0777] In some embodiments, (Sp)t(Rp)n(Sp)m is SpRpSpSp. In some embodiments, (Sp)t(Rp)n(Sp)m is (Sp)₂Rp(Sp)₂. In some embodiments, (Sp)t(Rp)n(Sp)m is (Sp)₃Rp(Sp)₃. In some embodiments, (Sp)t(Rp)n(Sp)m is (Sp)₄Rp(Sp)₄. In some embodiments, (Sp)t(Rp)n(Sp)m is (Sp)tRp(Sp)₅. In some embodiments, (Sp)t(Rp)n(Sp)m is SpRp(Sp)₅. In some embodiments, (Sp)t(Rp)n(Sp)m is (Sp)₂Rp(Sp)₅. In some embodiments, (Sp)t(Rp)n(Sp)m is (Sp)₃Rp(Sp)₅. In some embodiments, (Sp)t(Rp)n(Sp)m is (Sp)₄Rp(Sp)₅. In some embodiments, (Sp)t(Rp)n(Sp)m is (Sp)₅Rp(Sp)₅.

[0778] In some embodiments, (Sp)m(Rp)n(Sp)t is (Sp)₂Rp(Sp)₂. In some embodiments, (Sp)m(Rp)n(Sp)t is (Sp)₃Rp(Sp)₃. In some embodiments, (Sp)m(Rp)n(Sp)t is (Sp)₄Rp(Sp)₄. In some embodiments, (Sp)m(Rp)n(Sp)t is (Sp)mRp(Sp)₅. In some embodiments, (Sp)m(Rp)n(Sp)t is (Sp)₂Rp(Sp)₅. In some embodiments, (Sp)m(Rp)n(Sp)t is (Sp)₃Rp(Sp)₅. In some embodiments, (Sp)m(Rp)n(Sp)t is (Sp)₄Rp(Sp)₅. In some embodiments, (Sp)m(Rp)n(Sp)t is (Sp)₅Rp(Sp)₅.

[0779] In some embodiments, a core region comprises at least one Rp internucleotidic linkage. In some embodiments, a core region of a wing-core-wing motif comprises at least one Rp internucleotidic linkage. In some embodiments, a core region comprises at least one Rp phosphorothioate internucleotidic linkage. In some embodiments, a core region of a wing-core-wing motif comprises at least one Rp phosphorothioate internucleotidic linkage. In some embodiments, a core region of a wing-core-wing motif comprises only one Rp phosphorothioate internucleotidic linkage. In some embodiments, a core region motif comprises at least two Rp internucleotidic linkages. In some embodiments, a core region of a wing-core-wing motif comprises at least two Rp internucleotidic linkages. In some embodiments, a core region of a wing-core-wing motif comprises at least two Rp phosphorothioate internucleotidic linkages. In some embodiments, a core region comprises at least three Rp internucleotidic linkages. In some embodiments, a core region of a wing-core-wing motif comprises at least three Rp internucleotidic linkages. In some embodiments, a core region comprises at least three Rp phosphorothioate internucleotidic linkages. In some embodiments, a core region of a wing-core-wing motif comprises at least three Rp phosphorothioate internucleotidic linkages. In some embodiments, a core region comprises at least 4, 5, 6, 7, 8, 9, or 10 Rp internucleotidic linkages. In some embodiments, a core region of a wing-core-wing motif comprises at least 4, 5, 6, 7, 8, 9, or 10 Rp internucleotidic linkages. In some embodiments, a core region comprises at least 4, 5, 6, 7, 8, 9, or 10 Rp phosphorothioate internucleotidic linkages. In some embodiments, a core region of a wing-core-wing motif comprises at least 4, 5, 6, 7, 8, 9, or 10 Rp phosphorothioate internucleotidic linkages.

[0780] In some embodiments, a wing region comprises 2′-modifications of sugar moieties that differ from a core region. In some embodiments, a wing region comprises the same type of 2′-modifications that differ from a core region. In some embodiments, a wing region comprises 2′-F which is absent from a core region. In some embodiments, a wing region comprises a pattern of 2′-F which is absent from a core region. In some embodiments, a wing region comprises a level of 2′-F which differs from a core region. In some embodiments, a level is absolute as measured by the number of 2′-F modifications. In some embodiments, a level is relative as measured by the percentage of 2′-F modifications. In some embodiments, a wing region differs from a core region in that it contains less of a 2′-modification presented in a core region, as measured by the number and/or percentage of such 2′-modifications. In some embodiments, a wing region contains less of a 2-OR¹ modification in a core region. In some embodiments, a wing region contains less of a 2′-OMe modification in a core region. In some embodiments, a wing region differs from a core region in that it contains less of unmodified sugar moieties presented in a core region, as measured by the number and/or percentage of such 2′-modifications.

[0781] In some embodiments, provided CpG oligonucleotides comprise two or more wing regions and a core region, for example, provided CpG oligonucleotides can comprise a wing-core-wing structure. In some embodiments, each wing region comprises 2′-modifications of sugar moieties that differ from a core region. In some embodiments, each wing region comprises the same type of 2′-modifications that differ from a core region. In some embodiments, each wing region comprises 2′-F which is absent from a core region. In some embodiments, each wing region comprises a pattern of 2′-F which is absent from a core region. In some embodiments, each wing region comprises a level of 2′-F which differs from a core region. In some embodiments, a level is absolute as measured by the number of 2′-F modifications. In some embodiments, a level is relative as measured by the percentage of 2′-F modifications. In some embodiments, each wing region differs from a core region in that it contains less of a 2′-modification presented in a core region, as measured by the number and/or percentage of such 2′-modifications. In some embodiments, each wing region contains less of a 2-OR¹ modification in a core region. In some embodiments, each wing region contains less of a 2′-OMe modification in a core region. In some embodiments, each wing region differs from a core region in that it contains less of unmodified sugar moieties presented in a core region, as measured by the number and/or percentage of such 2′-modifications.

[0782] In certain embodiments, a wing-core-wing motif is a 5-10-5 motif wherein the residues at each wing region are 2′-modified residues. In certain embodiments, a wing-core-wing motif is a 5-10-5 motif wherein the residues at each wing region are 2′-OR¹-modified residues. In certain embodiments, a wing-core-wing motif is a 5-10-5 motif wherein the residues at each wing region are 2′-MOE-modified residues. In certain embodiments, a wing-core-wing motif is a 5-10-5 motif wherein the residues at each wing region are 2′-OMe-modified residues. In certain embodiments, a wing-core-wing motif is a 5-10-5 motif wherein the residues at each wing region are 2′-F-modified residues. In certain embodiments, a wing-core-wing motif is a 5-10-5 motif wherein the residues in the core region are 2′-deoxyribonucleoside residues. In certain embodiments, a wing-core-wing motif is a 5-10-5 motif, wherein all internucleotidic linkages are phosphorothioate linkages. In certain embodiments, a wing-core-wing motif is a 5-10-5 motif, wherein all internucleotidic linkages are chiral phosphorothioate linkages. In certain embodiments, a wing-core-wing motif is a 5-10-5 motif wherein the residues at each wing region are 2′-modified residues, the residues in the core region are 2′-deoxyribonucleoside residues, and all internucleotidic linkages in the core region are chiral phosphorothioate linkages. In certain embodiments, a wing-core-wing motif is a 5-10-5 motif wherein the residues at each wing region are 2′-OR¹-modified residues, the residues in the core region are 2′-deoxyribonucleoside residues, and all internucleotidic linkages in the core region are chiral phosphorothioate linkages. In certain embodiments, a wing-core-wing motif is a 5-10-5 motif wherein the residues at each wing region are 2′-MOE-modified residues, the residues in the core region are 2′-deoxyribonucleoside residues, and all internucleotidic linkages in the core region are chiral phosphorothioate linkages. In certain embodiments, a wing-core-wing motif is a 5-10-5 motif wherein the residues at each wing region are 2′-OMe-modified residues, the residues in the core region are 2′-deoxyribonucleoside residues, and all internucleotidic linkages in the core region are chiral phosphorothioate linkages.

[0783] In some embodiments, residues at the “X” wing region are not 2′-MOE-modified residues. In certain embodiments, a wing-core motif is a motif wherein the residues at the “X” wing region are not 2′-MOE-modified residues. In certain embodiments, a core-wing motif is a motif wherein the residues at the “X” wing region are not 2′-MOE-modified residues. In certain embodiments, a wing-core-wing motif is a motif wherein the residues at each “X” wing region are not 2′-MOE-modified residues. In certain embodiments, a wing-core-wing motif is a 5-10-5 motif wherein the residues at each “X” wing region are not 2′-MOE-modified residues. In certain embodiments, a wing-core-wing motif is a 5-10-5 motif wherein the residues in the core “Y” region are 2′-deoxyribonucleoside residues. In certain embodiments, a wing-core-wing motif is a 5-10-5 motif, wherein all internucleotidic linkages are phosphorothioate internucleotidic linkages. In certain embodiments, a wing-core-wing motif is a 5-10-5 motif, wherein all internucleotidic linkages are chiral phosphorothioate internucleotidic linkages. In certain embodiments, a wing-core-wing motif is a 5-10-5 motif wherein the residues at each “X” wing region are not 2′-MOE-modified residues, the residues in the core “Y” region are 2′-deoxyribonucleoside, and all internucleotidic linkages are chiral phosphorothioate internucleotidic linkages.

[0784] In some embodiments, a chiral, modified phosphate linkage is a chiral phosphorothioate linkage, i.e., phosphorothioate internucleotidic linkage. In some embodiments, a core region comprises at least 5%, 10%, 15%, 20%, 25%, 30%, 35%, 40%, 45%, 50%, 55%, 60%, 65%, 70%, 75%, 80%, 85%, 90%, 95%, or 100% chiral phosphorothioate internucleotidic linkages. In some embodiments, all chiral, modified phosphate linkages are chiral phosphorothioate internucleotidic linkages. In some embodiments, at least about 10%, 20%, 30%, 40%, 50%, 60%, 70%, 80%, or 90% chiral phosphorothioate internucleotidic linkages of a core region are of the Sp conformation. In some embodiments, at least about 10% chiral phosphorothioate internucleotidic linkages of a core region are of the Sp conformation. In some embodiments, at least about 20% chiral phosphorothioate internucleotidic linkages of a core region are of the Sp conformation. In some embodiments, at least about 30% chiral phosphorothioate internucleotidic linkages of a core region are of the Sp conformation. In some embodiments, at least about 40% chiral phosphorothioate internucleotidic linkages of a core region are of the Sp conformation. In some embodiments, at least about 50% chiral phosphorothioate internucleotidic linkages of a core region are of the Sp conformation. In some embodiments, at least about 60% chiral phosphorothioate internucleotidic linkages of a core region are of the Sp conformation. In some embodiments, at least about 70% chiral phosphorothioate internucleotidic linkages of a core region are of the Sp conformation. In some embodiments, at least about 80% chiral phosphorothioate internucleotidic linkages of a core region are of the Sp conformation. In some embodiments, at least about 90% chiral phosphorothioate internucleotidic linkages of a core region are of the Sp conformation. In some embodiments, at least about 95% chiral phosphorothioate internucleotidic linkages of a core region are of the Sp conformation.

[0785] In some embodiments, at least about 10%, 20%, 30%, 40%, 50%, 60%, 70%, 80%, or 90% chiral phosphorothioate internucleotidic linkages of a core region are of the Rp conformation. In some embodiments, at least about 10% chiral phosphorothioate internucleotidic linkages of a core region are of the Rp conformation. In some embodiments, at least about 20% chiral phosphorothioate internucleotidic linkages of a core region are of the Rp conformation. In some embodiments, at least about 30% chiral phosphorothioate internucleotidic linkages of a core region are of the Rp conformation. In some embodiments, at least about 40% chiral phosphorothioate internucleotidic linkages of a core region are of the Rp conformation. In some embodiments, at least about 50% chiral phosphorothioate internucleotidic linkages of a core region are of the Rp conformation. In some embodiments, at least about 60% chiral phosphorothioate internucleotidic linkages of a core region are of the Rp conformation. In some embodiments, at least about 70% chiral phosphorothioate internucleotidic linkages of a core region are of the Rp conformation. In some embodiments, at least about 80% chiral phosphorothioate internucleotidic linkages of a core region are of the Rp conformation. In some embodiments, at least about 90% chiral phosphorothioate internucleotidic linkages of a core region are of the Rp conformation. In some embodiments, at least about 95% chiral phosphorothioate internucleotidic linkages of a core region are of the Rp conformation.

[0786] In some embodiments, less than about 10%, 20%, 30%, 40%, 50%, 60%, 70%, 80%, or 90% chiral phosphorothioate internucleotidic linkages of a core region are of the Rp conformation. In some embodiments, less than about 10% chiral phosphorothioate internucleotidic linkages of a core region are of the Rp conformation. In some embodiments, less than about 20% chiral phosphorothioate internucleotidic linkages of a core region are of the Rp conformation. In some embodiments, less than about 30% chiral phosphorothioate internucleotidic linkages of a core region are of the Rp conformation. In some embodiments, less than about 40% chiral phosphorothioate internucleotidic linkages of a core region are of the Rp conformation. In some embodiments, less than about 50% chiral phosphorothioate internucleotidic linkages of a core region are of the Rp conformation. In some embodiments, less than about 60% chiral phosphorothioate internucleotidic linkages of a core region are of the Rp conformation. In some embodiments, less than about 70% chiral phosphorothioate internucleotidic linkages of a core region are of the Rp conformation. In some embodiments, less than about 80% chiral phosphorothioate internucleotidic linkages of a core region are of the Rp conformation. In some embodiments, less than about 90% chiral phosphorothioate internucleotidic linkages of a core region are of the Rp conformation. In some embodiments, less than about 95% chiral phosphorothioate internucleotidic linkages of a core region are of the Rp conformation. In some embodiments, a core region has only one Rp chiral phosphorothioate internucleotidic linkages. In some embodiments, a core region has only one Rp chiral phosphorothioate internucleotidic linkages, wherein all internucleotide linkages are chiral phosphorothioate internucleotidic linkages.

[0787] In some embodiments, provided CpG oligonucleotides are blockmers. In some embodiments, provided CpG oligonucleotide are altmers. In some embodiments, provided CpG oligonucleotides are altmers comprising alternating blocks. In some embodiments, a blockmer or an altmer can be defined by chemical modifications (including presence or absence), e.g., base modifications, sugar modification, internucleotidic linkage modifications, stereochemistry, etc. Example chemical modifications, stereochemistry and patterns thereof for a block and/or an alternating unit include but are not limited to those described in this disclosure, such as those described for a wing, a core, a CpG oligonucleotide, etc. In some embodiments, a blockmer comprises a pattern of . . . SS . . . RR . . . SS . . . RR . . . In some embodiments, an altmer comprises a pattern of SRSRSRSR.

[0788] In some embodiments, a pattern of backbone chiral center, e.g., of a wing, a core, a block, comprises one or more (Rp)p(Sp)x(Rp)q(Sp)y, wherein each of p, x, q, y is independently 0-50, p+q >0, and x+y >0.

[0789] In some embodiments, a provided pattern of backbone chiral centers comprises repeating (Sp)m(Rp)n, (Rp)n(Sp)m, (Np)t(Rp)n(Sp)m, or (Sp)t(Rp)n(Sp)m units. In some embodiments, a repeating unit is (Sp)m(Rp)n. In some embodiments, a repeating unit is SpRp. In some embodiments, a repeating unit is SpSpRp. In some embodiments, a repeating unit is SpRpRp. In some embodiments, a repeating unit is RpRpSp. In some embodiments, a repeating unit is (Rp)n(Sp)m. In some embodiments, a repeating unit is (Np)t(Rp)n(Sp)m. In some embodiments, a repeating unit is (Sp)t(Rp)n(Sp)m.

[0790] In some embodiments, a provided pattern of backbone chiral centers comprises (Rp/Sp)x-(All Rp or All Sp)-(Rp/Sp)y. In some embodiments, a provided pattern of backbone chiral centers comprises (Rp/Sp)-(All Rp or All Sp)-(Rp/Sp). In some embodiments, a provided pattern of backbone chiral centers comprises (Rp)x-(All Sp)-(Rp)y. In some embodiments, a provided pattern of backbone chiral centers comprises (Rp)-(All Sp)-(Rp). In some embodiments, a provided pattern of backbone chiral centers comprises (Sp)x-(All Rp)-(Sp)y. In some embodiments, a provided pattern of backbone chiral centers comprises (Sp)-(All Rp)-(Sp). In some embodiments, a provided pattern of backbone chiral centers comprises (Rp/Sp)x-(repeating (Sp)m(Rp)n)-(Rp/Sp)y. In some embodiments, a provided pattern of backbone chiral centers comprises (Rp/Sp)-(repeating (Sp)m(Rp)n)-(Rp/Sp). In some embodiments, a provided pattern of backbone chiral centers comprises (Rp/Sp)x-(repeating SpSpRp)-(Rp/Sp)y. In some embodiments, a provided pattern of backbone chiral centers comprises (Rp/Sp)-(repeating SpSpRp)-(Rp/Sp).

[0791] In some embodiments, a provided pattern of backbone chiral centers is (Rp/Sp)x-(All Rp or All Sp)-(Rp/Sp)y. In some embodiments, a provided pattern of backbone chiral centers is (Rp/Sp)-(All Rp or All Sp)-(Rp/Sp). In some embodiments, a provided pattern of backbone chiral centers is (Rp)x-(All Sp)-(Rp)y. In some embodiments, a provided pattern of backbone chiral centers is (Rp)-(All Sp)-(Rp). In some embodiments, a provided pattern of backbone chiral centers is (Sp)x-(All Rp)-(Sp)y. In some embodiments, a provided pattern of backbone chiral centers is (Sp)-(All Rp)-(Sp). In some embodiments, a provided pattern of backbone chiral centers is (Rp/Sp)x-(repeating (Sp)m(Rp)n)-(Rp/Sp)y. In some embodiments, a provided pattern of backbone chiral centers is (Rp/Sp)-(repeating (Sp)m(Rp)n)-(Rp/Sp). In some embodiments, a provided pattern of backbone chiral centers is (Rp/Sp)x-(repeating SpSpRp)-(Rp/Sp)y. In some embodiments, a provided pattern of backbone chiral centers is (Rp/Sp)-(repeating SpSpRp)-(Rp/Sp).

[0792] A person of ordinary skill in the art understands that various regions of a target transcript can be targeted by provided compositions and methods. In some embodiments, a base sequence of provided CpG oligonucleotides comprises an intron sequence. In some embodiments, a base sequence of provided CpG oligonucleotides comprises an exon sequence. In some embodiments, a base sequence of provided CpG oligonucleotides comprises an intron and an exon sequence. In some embodiments, a base sequence of provided CpG oligonucleotides comprises a sequence spanning a splicing site. In some embodiments, a base sequence of provided CpG oligonucleotides comprises a sequence found in or comprising a 5′ splice site, a branch point sequence (BPS), a polypyrimidine tact (py tact), a 3′ splice site, an intronic splicing silencer (ISS), an exonic splicing silencer (ESS), an intronic splicing enhancer (ISE), and/or an exonic splicing enhancer. In some embodiments, a base sequence of provided CpG oligonucleotides is an intron sequence. In some embodiments, a base sequence of provided CpG oligonucleotides is an exon sequence. In some embodiments, a base sequence of provided CpG oligonucleotides is a sequence spanning a splicing site. In some embodiments, a base sequence of provided CpG oligonucleotides is a sequence found in or comprising a 5′ splice site, a branch point sequence (BPS), a polypyrimidine tact (py tact), a 3′ splice site, an intronic splicing silencer (ISS), an exonic splicing silencer (ESS), an intronic splicing enhancer (ISE), and/or an exonic splicing enhancer. In some embodiments, a base sequence of provided CpG oligonucleotides is a sequence found in a branch point sequence (BPS), a polypyrimidine tact (py tact), an intronic splicing silencer (ISS), an exonic splicing silencer (ESS), an intronic splicing enhancer (ISE), and/or an exonic splicing enhancer.

[0793] As understood by a person having ordinary skill in the art, provided CpG oligonucleotides and compositions, among other things, can target a great number of nucleic acid polymers. For instance, in some embodiments, provided CpG oligonucleotides and compositions can target a transcript of a nucleic acid sequence, wherein a common base sequence of CpG oligonucleotides (e.g., a base sequence of a CpG oligonucleotide type) comprises or is a sequence complementary to a sequence of the transcript. In some embodiments, a common base sequence comprises a sequence complimentary to a sequence of a target. In some embodiments, a common base sequence is a sequence complimentary to a sequence of a target. In some embodiments, a common base sequence comprises or is a sequence 100% complimentary to a sequence of a target. In some embodiments, a common base sequence comprises a sequence 100% complimentary to a sequence of a target. In some embodiments, a common base sequence is a sequence 100% complimentary to a sequence of a target. In some embodiments, a common base sequence in a core comprises or is a sequence complimentary to a sequence of a target. In some embodiments, a common base sequence in a core comprises a sequence complimentary to a sequence of a target. In some embodiments, a common base sequence in a core is a sequence % complimentary to a sequence of a target. In some embodiments, a common base sequence in a core comprises or is a sequence 100% complimentary to a sequence of a target. In some embodiments, a common base sequence in a core comprises a sequence 100% complimentary to a sequence of a target. In some embodiments, a common base sequence in a core is a sequence 100% complimentary to a sequence of a target.

[0794] In some embodiments, as described in this disclosure, provided CpG oligonucleotides and compositions can provide new cleavage patterns, higher cleavage rate, higher cleavage degree, higher cleavage selectivity, etc. In some embodiments, provided compositions can selectively suppress (e.g., cleave) a transcript from a target nucleic acid sequence which has one or more similar sequences exist within a subject or a population, each of the target and its similar sequences contains a specific nucleotide characteristic sequence element that defines the target sequence relative to the similar sequences. In some embodiments, for example, a target sequence is a wild-type allele or copy of a gene, and a similar sequence is a sequence has very similar base sequence, e.g., a sequence having SNP, mutations, etc.

[0795] In some embodiments, a similar sequence has greater than 60%, 65%, 70%, 75%, 80%, 85%, 90%, 91%, 92%, 93%, 94%, 95%, 96%, 97%, 98% or 99% sequence homology with a target sequence. In some embodiments, a target sequence is a disease-causing copy of a nucleic acid sequence comprising one or more mutations and/or SNPs, and a similar sequence is a copy not causing the disease (wild type). In some embodiments, a target sequence comprises a mutation, wherein a similar sequence is the corresponding wild-type sequence. In some embodiments, a target sequence is a mutant allele, while a similar sequence is a wild-type allele. In some embodiments, a target sequence comprises an SNP that is associated with a disease-causing allele, while a similar sequence comprises the same SNP that is not associates with the disease-causing allele. In some embodiments, the region of a target sequence that is complementary to a common base sequence of a provided CpG oligonucleotide composition has greater than 60%, 65%, 70%, 75%, 80%, 85%, 90%, 91%, 92%, 93%, 94%, 95%, 96%, 97%, 98% or 99% sequence homology with the corresponding region of a similar sequence. In some embodiments, the region of a target sequence that is complementary to a common base sequence of a provided CpG oligonucleotide composition differs from the corresponding region of a similar sequence at less than 5, less than 4, less than 3, less than 2, or only 1 base pairs. In some embodiments, the region of a target sequence that is complementary to a common base sequence of a provided CpG oligonucleotide composition differs from the corresponding region of a similar sequence only at a mutation site or SNP site. In some embodiments, the region of a target sequence that is complementary to a common base sequence of a provided CpG oligonucleotide composition differs from the corresponding region of a similar sequence only at a mutation site. In some embodiments, the region of a target sequence that is complementary to a common base sequence of a provided CpG oligonucleotide composition differs from the corresponding region of a similar sequence only at an SNP site.

[0796] In some embodiments, a common base sequence comprises or is a sequence complementary to a characteristic sequence element. In some embodiments, a common base sequence comprises a sequence complementary to a characteristic sequence element. In some embodiments, a common base sequence is a sequence complementary to a characteristic sequence element. In some embodiments, a common base sequence comprises or is a sequence 100% complementary to a characteristic sequence element. In some embodiments, a common base sequence comprises a sequence 100% complementary to a characteristic sequence element. In some embodiments, a common base sequence is a sequence 100% complementary to a characteristic sequence element. In some embodiments, a common base sequence in a core comprises or is a sequence complementary to a characteristic sequence element. In some embodiments, a common base sequence in a core comprises a sequence complementary to a characteristic sequence element. In some embodiments, a common base sequence in a core is a sequence complementary to a characteristic sequence element. In some embodiments, a common base sequence in a core comprises or is a sequence 100% complementary to a characteristic sequence element. In some embodiments, a common base sequence in a core comprises a sequence 100% complementary to a characteristic sequence element. In some embodiments, a common base sequence in a core is a sequence 100% complementary to a characteristic sequence element.

[0797] Among other things, the present disclosure recognizes that a base sequence can have impact on oligonucleotide properties. In some embodiments, a base sequence can have impact on cleavage pattern of a target when CpG oligonucleotides having the base sequence are utilized for suppressing a target, e.g., through a pathway involving RNase H. In some embodiments, a common base sequence of a non-stereorandom CpG oligonucleotide compositions (e.g., certain oligonucleotide compositions provided in the present disclosure) is a base sequence that when applied to a DNA oligonucleotide composition or a stereorandom all-phosphorothioate oligonucleotide composition, cleavage pattern of the DNA (DNA cleavage pattern) and/or the stereorandom all-phosphorothioate (stereorandom cleavage pattern) composition has a cleavage site within or in the vicinity of a characteristic sequence element. In some embodiments, a cleavage site within or in the vicinity is within a sequence complementary to a core region of a common sequence. In some embodiments, a cleavage site within or in the vicinity is within a sequence 100% complementary to a core region of a common sequence.

[0798] In some embodiments, a common base sequence is a base sequence that has a cleavage site within or in the vicinity of a characteristic sequence element in its DNA cleavage pattern. In some embodiments, a common base sequence is a base sequence that has a cleavage site within a characteristic sequence element in its DNA cleavage pattern. In some embodiments, a common base sequence is a base sequence that has a cleavage site in the vicinity of a characteristic sequence element in its DNA cleavage pattern. In some embodiments, a common base sequence is a base sequence that has a cleavage site in the vicinity of a mutation or SNP of a characteristic sequence element in its DNA cleavage pattern. In some embodiments, a common base sequence is a base sequence that has a cleavage site in the vicinity of a mutation in its DNA cleavage pattern. In some embodiments, a common base sequence is a base sequence that has a cleavage site in the vicinity of an SNP in its DNA cleavage pattern.

[0799] In some embodiments, a common base sequence is a base sequence that has a cleavage site within or in the vicinity of a characteristic sequence element in its stereorandom cleavage pattern. In some embodiments, a common base sequence is a base sequence that has a cleavage site within a characteristic sequence element in its stereorandom cleavage pattern. In some embodiments, a common base sequence is a base sequence that has a cleavage site in the vicinity of a characteristic sequence element in its stereorandom cleavage pattern. In some embodiments, a common base sequence is a base sequence that has a cleavage site in the vicinity of a mutation or SNP of a characteristic sequence element in its stereorandom cleavage pattern. In some embodiments, a common base sequence is a base sequence that has a cleavage site in the vicinity of a mutation in its stereorandom cleavage pattern. In some embodiments, a common base sequence is a base sequence that has a cleavage site in the vicinity of an SNP in its stereorandom cleavage pattern.

[0800] In some embodiments, a common base sequence comprises or is a sequence complementary to a nucleic acid sequence. In some embodiments, a common base sequence comprises or is a sequence 100% complementary to a nucleic acid sequence. In some embodiments, a common base sequence comprises or is a sequence complementary to a disease-causing nucleic acid sequence. In some embodiments, a common base sequence comprises or is a sequence 100% complementary to a disease-causing nucleic acid sequence. In some embodiments, a common base sequence comprises or is a sequence complementary to a characteristic sequence element of disease-causing nucleic acid sequence, which characteristic sequences differentiate a disease-causing nucleic acid sequence from a non-diseasing-causing nucleic acid sequence. In some embodiments, a common base sequence comprises or is a sequence 100% complementary to a characteristic sequence element of disease-causing nucleic acid sequence, which characteristic sequences differentiate a disease-causing nucleic acid sequence from a non-diseasing-causing nucleic acid sequence. In some embodiments, a common base sequence comprises or is a sequence complementary to a disease-associated nucleic acid sequence. In some embodiments, a common base sequence comprises or is a sequence 100% complementary to a disease-associated nucleic acid sequence. In some embodiments, a common base sequence comprises or is a sequence complementary to a characteristic sequence element of disease-associated nucleic acid sequence, which characteristic sequences differentiate a disease-associated nucleic acid sequence from a non-diseasing-associated nucleic acid sequence. In some embodiments, a common base sequence comprises or is a sequence 100% complementary to a characteristic sequence element of disease-associated nucleic acid sequence, which characteristic sequences differentiate a disease-associated nucleic acid sequence from a non-diseasing-associated nucleic acid sequence.

[0801] In some embodiments, a common base sequence comprises or is a sequence complementary to a gene. In some embodiments, a common base sequence comprises or is a sequence 100% complementary to a gene. In some embodiments, a common base sequence comprises or is a sequence complementary to a characteristic sequence element of a gene, which characteristic sequences differentiate the gene from a similar sequence sharing homology with the gene. In some embodiments, a common base sequence comprises or is a sequence 100% complementary to a characteristic sequence element of a gene, which characteristic sequences differentiate the gene from a similar sequence sharing homology with the gene. In some embodiments, a common base sequence comprises or is a sequence complementary to characteristic sequence element of a target gene, which characteristic sequences comprises a mutation that is not found in other copies of the gene, e.g., the wild-type copy of the gene, another mutant copy the gene, etc. In some embodiments, a common base sequence comprises or is a sequence 100% complementary to characteristic sequence element of a target gene, which characteristic sequences comprises a mutation that is not found in other copies of the gene, e.g., the wild-type copy of the gene, another mutant copy the gene, etc.

[0802] In some embodiments, a common base sequence comprises or is a sequence complementary to a sequence comprising an SNP. In some embodiments, a common base sequence comprises or is a sequence complementary to a sequence comprising an SNP, and the common base sequence is 100% complementary to the SNP that is associated with a disease.

[0803] In some embodiments, a chiral internucleotidic linkage in provided CpG oligonucleotides has the structure of formula I. In some embodiments, a chiral internucleotidic linkage is phosphorothioate. In some embodiments, each chiral internucleotidic linkage in a single CpG oligonucleotide of a provided composition independently has the structure of formula I. In some embodiments, each chiral internucleotidic linkage in a single CpG oligonucleotide of a provided composition is a phosphorothioate.

[0804] In some embodiments, CpG oligonucleotides of the present disclosure comprise one or more modified sugar moieties. In some embodiments, CpG oligonucleotides of the present disclosure comprise one or more modified base moieties. As known by a person of ordinary skill in the art and described in the disclosure, various modifications can be introduced to a sugar and/or moiety. For example, in some embodiments, a modification is a modification described in U.S. Pat. No. 9,006,198, WO2014/012081 and WO/2015/107425, the sugar and base modifications of each of which are incorporated herein by reference.

[0805] In some embodiments, a sugar modification is a 2′-modification. Commonly used 2′-modifications include but are not limited to 2′-OR¹, wherein R¹ is not hydrogen. In some embodiments, a modification is 2′-OR, wherein R is optionally substituted aliphatic. In some embodiments, a modification is 2′-OMe. In some embodiments, a modification is 2′-O-MOE. In some embodiments, the present disclosure demonstrates that inclusion and/or location of particular chirally pure internucleotidic linkages can provide stability improvements comparable to or better than those achieved through use of modified backbone linkages, bases, and/or sugars. In some embodiments, a provided single CpG oligonucleotide of a provided composition has no modifications on the sugars. In some embodiments, a provided single CpG oligonucleotide of a provided composition has no modifications on 2′-positions of the sugars (i.e., the two groups at the 2′-position are either -H/—H or -H/—OH). In some embodiments, a provided single CpG oligonucleotide of a provided composition does not have any 2′-MOE modifications.

[0806] In some embodiments, a 2′-modification is —O-L- or -L- which connects the 2′-carbon of a sugar moiety to another carbon of a sugar moiety. In some embodiments, a 2′-modification is —O-L- or -L- which connects the 2′-carbon of a sugar moiety to the 4′-carbon of a sugar moiety. In some embodiments, a 2′-modification is S-cEt. In some embodiments, a modified sugar moiety is an LNA moiety.

[0807] In some embodiments, a 2′-modification is —F. In some embodiments, a 2′-modification is FANA. In some embodiments, a 2′-modification is FRNA.

[0808] In some embodiments, a sugar modification is a 5′-modification, e.g., R-5′-Me, S-5′-Me, etc.

[0809] In some embodiments, a sugar modification changes the size of the sugar ring. In some embodiments, a sugar modification is the sugar moiety in FHNA.

[0810] In some embodiments, a sugar modification replaces a sugar moiety with another cyclic or acyclic moiety. Example such moieties are widely known in the art, including but not limited to those used in morpholino (optionally with its phosphorodiamidate linkage), glycol nucleic acids, etc.

[0811] In some embodiments, a provided CpG oligonucleotide in a provided composition has at least about 25% of its internucleotidic linkages in Sp configuration. In some embodiments, a provided CpG oligonucleotide in a provided composition has at least about 30% of its internucleotidic linkages in Sp configuration. In some embodiments, a provided CpG oligonucleotide in a provided composition has at least about 35% of its internucleotidic linkages in Sp configuration. In some embodiments, a provided CpG oligonucleotide in a provided composition has at least about 40% of its internucleotidic linkages in Sp configuration. In some embodiments, a provided CpG oligonucleotide in a provided composition has at least about 45% of its internucleotidic linkages in Sp configuration. In some embodiments, a provided CpG oligonucleotide in a provided composition has at least about 50% of its internucleotidic linkages in Sp configuration. In some embodiments, a provided CpG oligonucleotide in a provided composition has at least about 55% of its internucleotidic linkages in Sp configuration. In some embodiments, a provided CpG oligonucleotide in a provided composition has at least about 60% of its internucleotidic linkages in Sp configuration. In some embodiments, a provided CpG oligonucleotide in a provided composition has at least about 65% of its internucleotidic linkages in Sp configuration. In some embodiments, a provided CpG oligonucleotide in a provided composition has at least about 70% of its internucleotidic linkages in Sp configuration. In some embodiments, a provided CpG oligonucleotide in a provided composition has at least about 75% of its internucleotidic linkages in Sp configuration. In some embodiments, a provided CpG oligonucleotide in a provided composition has at least about 80% of its internucleotidic linkages in Sp configuration. In some embodiments, a provided CpG oligonucleotide in a provided composition has at least about 85% of its internucleotidic linkages in Sp configuration. In some embodiments, a provided CpG oligonucleotide in a provided composition has at least about 90% of its internucleotidic linkages in Sp configuration.

[0812] In some embodiments, the present disclosure provides chirally controlled CpG oligonucleotide compositions which are of high crude purity and of high diastereomeric purity. In some embodiments, the present disclosure provides and chirally controlled CpG oligonucleotide compositions which are of high crude purity. In some embodiments, the present disclosure provides chirally controlled CpG oligonucleotide compositions which are of high diastereomeric purity.

[0813] In some embodiments, a chirally controlled CpG oligonucleotide composition is a substantially pure preparation of a CpG oligonucleotide type in that CpG oligonucleotides in the composition that are not of the CpG oligonucleotide type are impurities form the preparation process of said CpG oligonucleotide type, in some case, after certain purification procedures.

[0814] In some embodiments, the present disclosure provides a compound of formula O—I:

[chemical structure]

or a salt thereof, wherein:
[0815] each BA is independently an optionally substituted group selected from C₁₋₃₀ cycloaliphatic, C₆₋₃₀ aryl, C₅₋₃₀ heteroaryl having 1-10 heteroatoms, C₃₋₃₀ heterocyclyl having 1-10 heteroatoms, a natural nucleobase moiety, and a modified nucleobase moiety;
[0816] each of R^{5E} and R^{s} is independently —H, —F, —Cl, —Br, —I, —CN, —N₃, —NO, —NO₂, -L-R′, -L-OR′, -L-SR′, -L-N(R′)₂, —O-L-OR′, —O-L-SR′, or —O-L-N(R′)₂;
[0817] s is 0-20;
[0818] each L is independently a covalent bond, or a bivalent, optionally substituted, linear or branched group selected from a C₁₋₃₀ aliphatic group and a C₁₋₃₀ heteroaliphatic group having 1-10 heteroatoms, wherein one or more methylene units are optionally and independently replaced with C₁₋₆ alkylene, C₁₋₆ alkenylene, —C≡C—, —C(R′)₂—, —O—, —S—, —S—S—, —N(R′)—, —C(O)—, —C(S)—, —C(NR′)—, —C(O)N(R′)—, —N(R′)C(O)N(R′)—, —N(R′)C(O)O—, —S(O)—, —S(O)₂—, —S(O)₂N(R′)—, —C(O)S—, —C(O)O—, —P(O)(OR′)—, —P(O)(SR′)—, —P(O)(R′)—, —P(O)(NR′)—, —P(S)(OR′)—, —P(S)(SR′)—, —P(S)(R′)—, —P(S)(NR′)—, —P(R′)—, —P(OR′)—, —P(SR′)—, —P(NR′)—, —P(OR′)[B(R′)₃]—, —OP(O)(OR′)O—, —OP(O)(SR′)O—, —OP(O)(R′)O—, —OP(O)(NR′)O—, —OP(OR′)O—, —OP(SR′)O—, —OP(NR′)O—, —OP(R′)O—, or —OP(OR′)[B(R′)₃]O—; and one or more carbon atoms are optionally and independently replaced with Cy^{L};
[0819] each Cy^{L} is independently an optionally substituted tetravalent group selected from a C₃₋₂₀ cycloaliphatic ring, a C₆₋₂₀ aryl ring, a 5-20 membered heteroaryl ring having 1-10 heteroatoms, and a 3-20 membered heterocyclyl ring having 1-10 heteroatoms;
[0820] each Ring A is independently an optionally substituted 3-20 membered monocyclic, bicyclic or polycyclic ring having 0-10 heteroatoms;
[0821] each L^{P} is independently an internucleotidic linkage;
[0822] z is 1-1000;
[0823] L^{3E} is -L- or -L-L-;
[0824] R^{3E} is —R′, -L-R′, —OR′, or a solid support;
[0825] each R′ is independently —R, —C(O)R, —C(O)OR, or —S(O)₂R;
[0826] each R is independently —H, or an optionally substituted group selected from C₁₋₃₀ aliphatic, C₁₋₃₀ heteroaliphatic having 1-10 heteroatoms, C₆₋₃₀ aryl, C₆₋₃₀ arylaliphatic, C₆₋₃₀ arylheteroaliphatic having 1-10 heteroatoms, 5-30 membered heteroaryl having 1-10 heteroatoms, and 3-30 membered heterocyclyl having 1-10 heteroatoms, or
[0827] two R groups are optionally and independently taken together to form a covalent bond, or:
[0828] two or more R groups on the same atom are optionally and independently taken together with the atom to form an optionally substituted, 3-30 membered monocyclic, bicyclic or polycyclic ring having, in addition to the atom, 0-10 heteroatoms; or
[0829] two or more R groups on two or more atoms are optionally and independently taken together with their intervening atoms to form an optionally substituted, 3-30 membered monocyclic, bicyclic or polycyclic ring having, in addition to the intervening atoms, 0-10 heteroatoms.

[0830] In some embodiments, a heteroatom is independently selected from oxygen, nitrogen, sulfur, phosphorus, boron and silicon. In some embodiments, a heteroatom is independently selected from oxygen, nitrogen, sulfur, and phosphorus. In some embodiments, a heteroatom is independently selected from oxygen, nitrogen, and sulfur.

[0831] In some embodiments, provided oligonucleotides, e.g., oligonucleotides of a type, oligonucleotide of a plurality, etc., are compounds having the structure of formula O—I or salts thereof. In some embodiments, an internucleotidic linkage has the structure of formula L-I:

[chemical structure]

or a salt form thereof, wherein:
[0832] P^{L} is P(═W), P, or P→B(R′)₃;
[0833] W is O, S or Se;
[0834] R¹ is -L-R, halogen, —CN, —NO₂, —Si(R)₃, —OR, —SR, or —N(R)₂;
[0835] each of X, Y and Z is independently —O—, —S—, —N(-L-R¹)—, or L.

[0836] In some embodiments, a modified internucleotidic linkage has the structure of formula L-1. In some embodiments, a modified internucleotidic linkage of formula L-I has the structure of formula I.

[0837] In some embodiments, the present disclosure provides CpG oligonucleotides comprising one or more diastereomerically pure internucleotidic linkages with respect to the chiral linkage phosphorus within the composition. In some embodiments, the present disclosure provides CpG oligonucleotides comprising one or more diastereomerically pure internucleotidic linkages having the structure of formula I. In some embodiments, the present disclosure provides CpG oligonucleotides comprising one or more diastereomerically pure internucleotidic linkages with respect to the chiral linkage phosphorus, and one or more phosphate diester linkages. In some embodiments, the present disclosure provides CpG oligonucleotides comprising one or more diastereomerically pure internucleotidic linkages having the structure of formula I, and one or more phosphate diester linkages. In some embodiments, the present disclosure provides CpG oligonucleotides comprising one or more diastereomerically pure internucleotidic linkages having the structure of formula I-c, and one or more phosphate diester linkages. In some embodiments, such CpG oligonucleotides are prepared by using stereoselective oligonucleotide synthesis, as described in this application, to form pre-designed diastereomerically pure internucleotidic linkages with respect to the chiral linkage phosphorus.

[0838] In certain embodiments, a modified internucleotidic linkages has the structure of formula I:

[chemical structure]

wherein each variable is as defined and described below. In some embodiments, a linkage of formula I is chiral. In some embodiments, the present disclosure provides CpG oligonucleotides comprising one or more modified internucleotidic linkages of formula I. In some embodiments, the present disclosure provides a CpG oligonucleotide comprising one or more modified internucleotidic linkages of formula I, and wherein individual internucleotidic linkages of formula I within the CpG oligonucleotide have different P-modifications relative to one another. In some embodiments, the present disclosure provides a CpG oligonucleotide comprising one or more modified internucleotidic linkages of formula I, and wherein individual internucleotidic linkages of formula I within the CpG oligonucleotide have different —X-L-R¹ relative to one another. In some embodiments, the present disclosure provides a CpG oligonucleotide comprising one or more modified internucleotidic linkages of formula I, and wherein individual internucleotidic linkages of formula I within the CpG oligonucleotide have different X relative to one another. In some embodiments, the present disclosure provides a CpG oligonucleotide comprising one or more modified internucleotidic linkages of formula I, and wherein individual internucleotidic linkages of formula I within the CpG oligonucleotide have different -L-R¹ relative to one another.

[0839] In some embodiments, a chirally controlled CpG oligonucleotide is a CpG oligonucleotide in a chirally controlled composition that is of the particular CpG oligonucleotide type, and the chirally controlled CpG oligonucleotide is of the type. In some embodiments, a chirally controlled CpG oligonucleotide is a CpG oligonucleotide in a provided composition that comprises a predetermined level of a plurality of CpG oligonucleotides that share a common base sequence, a common pattern of backbone linkages, and a common pattern of backbone chiral centers, and the chirally controlled CpG oligonucleotide shares the common base sequence, the common pattern of backbone linkages, and the common pattern of backbone chiral centers.

[0840] In some embodiments, the present disclosure provides a chirally controlled CpG oligonucleotide, wherein at least two of the individual internucleotidic linkages within the CpG oligonucleotide have different stereochemistry and/or different P-modifications relative to one another. In some embodiments, the present disclosure provides a chirally controlled CpG oligonucleotide, wherein at least two of the individual internucleotidic linkages within the CpG oligonucleotide have different stereochemistry relative to one another, and wherein at least a portion of the structure of the chirally controlled CpG oligonucleotide is characterized by a repeating pattern of alternating stereochemistry.

[0841] In some embodiments, the present disclosure provides a chirally controlled CpG oligonucleotide, wherein at least two of the individual internucleotidic linkages within the CpG oligonucleotide have different P-modifications relative to one another, in that they have different X atoms in their -XLR¹ moieties, and/or in that they have different L groups in their -XLR¹ moieties, and/or that they have different R¹ atoms in their -XLR¹ moieties.

[0842] In some embodiments, the present disclosure provides a chirally controlled CpG oligonucleotide, wherein at least two of the individual internucleotidic linkages within the CpG oligonucleotide have different stereochemistry and/or different P-modifications relative to one another and the CpG oligonucleotide has a structure represented by the following formula:

[chemical structure]

[0843] wherein:
[0844] each R^{B} independently represents a block of nucleotide units having the R configuration at the linkage phosphorus;
[0845] each S^{B} independently represents a block of nucleotide units having the S configuration at the linkage phosphorus;
[0846] each of n1-ny is zero or an integer, with the requirement that at least one odd n and at least one even n must be non-zero so that the CpG oligonucleotide includes at least two individual internucleotidic linkages with different stereochemistry relative to one another; and
[0847] wherein the sum of n1-ny is between 2 and 200, and in some embodiments is between a lower limit selected from the group consisting of 2, 3, 4, 5, 6, 7, 8, 9, 10, 11, 12, 13, 14, 15, 16, 17, 18, 19, 20, 21, 22, 23, 24, 25 or more and an upper limit selected from the group consisting of 5, 10, 15, 20, 25, 30, 35, 40, 45, 50, 55, 60, 65, 70, 75, 80, 85, 90, 95, 100, 110, 120, 130, 140, 150, 160, 170, 180, 190, and 200, the upper limit being larger than the lower limit.

[0848] In some embodiments, y is 1-200. In some embodiments, each of n1 to ny is independently 0-200, for example, 0, 1, 2, 3, 4, 5, 6, 7, 8, 9, 10, 11, 12, 13, 14, 15, 16, 17, 18, 19, 20, 21, 22, 23, 24, 25, 26, 27, 28, 29, 30, etc.

[0849] In some such embodiments, each n has the same value; in some embodiments, each even n has the same value as each other even n; in some embodiments, each odd n has the same value each other odd n; in some embodiments, at least two even ns have different values from one another; in some embodiments, at least two odd ns have different values from one another.

[0850] In some embodiments, at least two adjacent ns are equal to one another, so that a provided CpG oligonucleotide includes adjacent blocks of S stereochemistry linkages and R stereochemistry linkages of equal lengths. In some embodiments, provided CpG oligonucleotides include repeating blocks of S and R stereochemistry linkages of equal lengths. In some embodiments, provided CpG oligonucleotides include repeating blocks of S and R stereochemistry linkages, where at least two such blocks are of different lengths from one another; in some such embodiments each S stereochemistry block is of the same length, and is of a different length from each R stereochemistry length, which can optionally be of the same length as one another.

[0851] In some embodiments, at least two skip-adjacent ns are equal to one another, so that a provided CpG oligonucleotide includes at least two blocks of linkages of a first stereochemistry that are equal in length to one another and are separated by a block of linkages of the other stereochemistry, which separating block can be of the same length or a different length from the blocks of first stereochemistry.

[0852] In some embodiments, ns associated with linkage blocks at the ends of a provided CpG oligonucleotide are of the same length. In some embodiments, provided CpG oligonucleotides have terminal blocks of the same linkage stereochemistry. In some such embodiments, the terminal blocks are separated from one another by a middle block of the other linkage stereochemistry.

[0853] In some embodiments, a provided CpG oligonucleotide of formula [S^{B}n1R^{B}n2S^{B}n3R^{B}n4 . . . S^{B}nxR^{B}ny] is a stereoblockmer. In some embodiments, a provided CpG oligonucleotide of formula [S^{B}n1R^{B}n2S^{B}n3R^{B}n4 . . . S^{B}nxR^{B}ny] is a stereoskipmer. In some embodiments, a provided CpG oligonucleotide of formula [S^{B}n1R^{B}n2S^{B}n3R^{B}n4 . . . S^{B}nxR^{B}ny] is a stereoaltmer. In some embodiments, a provided CpG oligonucleotide of formula [S^{B}n1R^{B}n2S^{B}n3R^{B}n4 . . . S^{B}nxR^{B}ny] is a gapmer.

[0854] In some embodiments, a provided CpG oligonucleotide of formula [S^{B}n1R^{B}n2S^{B}n3R^{B}n4 . . . S^{B}nxR^{B}ny] is of any of the above described patterns and further comprises patterns of P-modifications. For instance, in some embodiments, a provided CpG oligonucleotide of formula [S^{B}n1R^{B}n2S^{B}n3R^{B}n4 . . . S^{B}nxR^{B}ny] and is a stereoskipmer and P-modification skipmer. In some embodiments, a provided CpG oligonucleotide of formula [S^{B}n1R^{B}n2S^{B}n3R^{B}n4 . . . S^{B}nxR^{B}ny] and is a stereoblockmer and P-modification altmer. In some embodiments, a provided CpG oligonucleotide of formula [S^{B}n1R^{B}n2S^{B}n3R^{B}n4 . . . S^{B}nxR^{B}ny] and is a stereoaltmer and P-modification blockmer.

[0855] In some embodiments, a provided CpG oligonucleotide, for example, a CpG oligonucleotide of formula [S^{B}n1R^{B}n2S^{B}n3R^{B}n4 . . . S^{B}nxR^{B}ny], is a chirally controlled CpG oligonucleotide comprising one or more modified internucleotidic linkages independently having the structure of formula I:

[chemical structure]

[0856] wherein:
[0857] P* is an asymmetric phosphorus atom and is either Rp or Sp;
[0858] W is O, S or Se;
[0859] each of X, Y and Z is independently —O—, —S—, —N(-L-R¹)—, or L;
[0860] L is a covalent bond or an optionally substituted, linear or branched C₁-C₁₀ alkylene, wherein one or more methylene units of L are optionally and independently replaced by an optionally substituted group selected from C₁-C₆ alkylene, C₁-C₆ alkenylene, —C≡C—, a C₁-C₆ heteroaliphatic moiety, —C(R′)₂—, —Cy-, —O—, —S—, —S—S—, —N(R′)—, —C(O)—, —C(S)—, —C(NR′)—, —C(O)N(R′)—, —N(R′)C(O)N(R′)—, —N(R′)C(O)—, —N(R′)C(O)O—, —OC(O)N(R′)—, —S(O)—, —S(O)₂—, —S(O)₂N(R′)—, —N(R′)S(O)₂——SC(O)—, —C(O)S—, —OC(O)—, and —C(O)O—;
[0861] R¹ is halogen, R, or an optionally substituted C₁-C₅₀ aliphatic wherein one or more methylene units are optionally and independently replaced by an optionally substituted group selected from C₁-C₆ alkylene, C₁-C₆ alkenylene, —C≡C—, a C₁-C₆ heteroaliphatic moiety, —C(R′)₂—, —Cy-, —O—, —S—, —S—S—, —N(R′)—, —C(O)—, —C(S)—, —C(NR′)—, —C(O)N(R′)—, —N(R′)C(O)N(R′)—, —N(R′)C(O)—, —N(R′)C(O)O—, —OC(O)N(R′)—, —S(O)—, —S(O)₂—, —S(O)₂N(R′)—, —N(R′)S(O)₂——SC(O)—, —C(O)S—, —OC(O)—, and —C(O)O—
[0862] each R′ is independently —R, —C(O)R, —CO₂R, or —SO₂R, or:
   [0863] two R′ are taken together with their intervening atoms to form an optionally substituted aryl, carbocyclic, heterocyclic, or heteroaryl ring;
[0864] —Cy- is an optionally substituted bivalent ring selected from phenylene, carbocyclylene, arylene, heteroarylene, and heterocyclylene;
[0865] each R is independently hydrogen, or an optionally substituted group selected from C₁-C₆ aliphatic, carbocyclyl, aryl, heteroaryl, and heterocyclyl; and
[0866] each

[chemical structure]

independently represents a connection to a nucleoside.

[0867] In some embodiments, a chirally controlled CpG oligonucleotide comprises one or more modified internucleotidic phosphorus linkages. In some embodiments, a chirally controlled CpG oligonucleotide comprises, e.g., a phosphorothioate or a phosphorothioate triester linkage. In some embodiments, a chirally controlled CpG oligonucleotide comprises a phosphorothioate triester linkage. In some embodiments, a chirally controlled CpG oligonucleotide comprises at least two phosphorothioate triester linkages. In some embodiments, a chirally controlled CpG oligonucleotide comprises at least three phosphorothioate triester linkages. In some embodiments, a chirally controlled CpG oligonucleotide comprises at least four phosphorothioate triester linkages. In some embodiments, a chirally controlled CpG oligonucleotide comprises at least five phosphorothioate triester linkages. Example such modified internucleotidic phosphorus linkages are described further herein.

[0868] In some embodiments, a chirally controlled CpG oligonucleotide comprises different internucleotidic phosphorus linkages. In some embodiments, a chirally controlled CpG oligonucleotide comprises at least one phosphate diester internucleotidic linkage and at least one modified internucleotidic linkage. In some embodiments, a chirally controlled CpG oligonucleotide comprises at least one phosphate diester internucleotidic linkage and at least one phosphorothioate triester linkage. In some embodiments, a chirally controlled CpG oligonucleotide comprises at least one phosphate diester internucleotidic linkage and at least two phosphorothioate triester linkages. In some embodiments, a chirally controlled CpG oligonucleotide comprises at least one phosphate diester internucleotidic linkage and at least three phosphorothioate triester linkages. In some embodiments, a chirally controlled CpG oligonucleotide comprises at least one phosphate diester internucleotidic linkage and at least four phosphorothioate triester linkages. In some embodiments, a chirally controlled CpG oligonucleotide comprises at least one phosphate diester internucleotidic linkage and at least five phosphorothioate triester linkages. Example such modified internucleotidic phosphorus linkages are described further herein.

[0869] In some embodiments, a phosphorothioate triester linkage comprises a chiral auxiliary, which, for example, is used to control the stereoselectivity of a reaction. In some embodiments, a phosphorothioate triester linkage does not comprise a chiral auxiliary. In some embodiments, a phosphorothioate triester linkage is intentionally maintained until and/or during the administration to a subject.

[0870] In some embodiments, a chirally controlled CpG oligonucleotide is linked to a solid support. In some embodiments, a chirally controlled CpG oligonucleotide is cleaved from a solid support.

[0871] In some embodiments, a chirally controlled CpG oligonucleotide comprises at least one phosphate diester internucleotidic linkage and at least two consecutive modified internucleotidic linkages. In some embodiments, a chirally controlled CpG oligonucleotide comprises at least one phosphate diester internucleotidic linkage and at least two consecutive phosphorothioate triester internucleotidic linkages.

[0872] In some embodiments, a chirally controlled CpG oligonucleotide is a blockmer. In some embodiments, a chirally controlled CpG oligonucleotide is a stereoblockmer. In some embodiments, a chirally controlled CpG oligonucleotide is a P-modification blockmer. In some embodiments, a chirally controlled CpG oligonucleotide is a linkage blockmer.

[0873] In some embodiments, a chirally controlled CpG oligonucleotide is an altmer. In some embodiments, a chirally controlled CpG oligonucleotide is a stereoaltmer. In some embodiments, a chirally controlled CpG oligonucleotide is a P-modification altmer. In some embodiments, a chirally controlled CpG oligonucleotide is a linkage altmer.

[0874] In some embodiments, a chirally controlled CpG oligonucleotide is a unimer. In some embodiments, a chirally controlled CpG oligonucleotide is a stereounimer. In some embodiments, a chirally controlled CpG oligonucleotide is a P-modification unimer. In some embodiments, a chirally controlled CpG oligonucleotide is a linkage unimer.

[0875] In some embodiments, a chirally controlled CpG oligonucleotide is a gapmer.

[0876] In some embodiments, a chirally controlled CpG oligonucleotide is a skipmer.

[0877] In some embodiments, the present disclosure provides CpG oligonucleotides comprising one or more modified internucleotidic linkages independently having the structure of formula I:

[chemical structure]

[0878] wherein:
[0879] P* is an asymmetric phosphorus atom and is either Rp or Sp;
[0880] W is O, S or Se;
[0881] each of X, Y and Z is independently —O—, —S—, —N(-L-R¹)—, or L;
[0882] L is a covalent bond or an optionally substituted, linear or branched C₁-C₁₀ alkylene, wherein one or more methylene units of L are optionally and independently replaced by an optionally substituted group selected from C₁-C₆ alkylene, C₁-C₆ alkenylene, —C≡C—, a C₁-C₆ heteroaliphatic moiety, —C(R′)₂—, —Cy-, —O—, —S—, —S—S—, —N(R′)—, —C(O)—, —C(S)—, —C(NR′)—, —C(O)N(R′)—, —N(R′)C(O)N(R′)—, —N(R′)C(O)—, —N(R′)C(O)O—, —OC(O)N(R′)—, —S(O)—, —S(O)₂—, —S(O)₂N(R′)—, —N(R′)S(O)₂—, —SC(O)—, —C(O)S—, —OC(O)—, and —C(O)O—;
[0883] R¹ is halogen, R, or an optionally substituted C₁-C₅₀ aliphatic wherein one or more methylene units are optionally and independently replaced by an optionally substituted group selected from C₁-C₆ alkylene, C₁-C₆ alkenylene, —C≡C—, a C₁-C₆ heteroaliphatic moiety, —C(R′)₂—, —Cy-, —O—, —S—, —S—S—, —N(R′)—, —C(O)—, —C(S)—, —C(NR′)—, —C(O)N(R′)—, —N(R′)C(O)N(R′)—, —N(R′)C(O)—, —N(R′)C(O)O—, —OC(O)N(R′)—, —S(O)—, —S(O)₂—, —S(O)₂N(R′)—, —N(R′)S(O)₂——SC(O)—, —C(O)S—, —OC(O)—, and —C(O)O—
[0884] each R′ is independently —R, —C(O)R, —CO₂R, or —SO₂R, or:
   [0885] two R′ are taken together with their intervening atoms to form an optionally substituted aryl, carbocyclic, heterocyclic, or heteroaryl ring;
[0886] —Cy- is an optionally substituted bivalent ring selected from phenylene, carbocyclylene, arylene, heteroarylene, and heterocyclylene;
[0887] each R is independently hydrogen, or an optionally substituted group selected from C₁-C₆ aliphatic, carbocyclyl, aryl, heteroaryl, and heterocyclyl; and
[0888] each

[chemical structure]

independently represents a connection to a nucleoside.

[0889] In some embodiments, P* is an asymmetric phosphorus atom and is either Rp or Sp. In some embodiments, P* is Rp. In other embodiments, P* is Sp. In some embodiments, a CpG oligonucleotide comprises one or more internucleotidic linkages of formula I wherein each P* is independently Rp or Sp. In some embodiments, a CpG oligonucleotide comprises one or more internucleotidic linkages of formula I wherein each P* is Rp. In some embodiments, a CpG oligonucleotide comprises one or more internucleotidic linkages of formula I wherein each P* is Sp. In some embodiments, a CpG oligonucleotide comprises at least one internucleotidic linkage of formula I wherein P* is Rp. In some embodiments, a CpG oligonucleotide comprises at least one internucleotidic linkage of formula I wherein P* is Sp. In some embodiments, a CpG oligonucleotide comprises at least one internucleotidic linkage of formula I wherein P* is Rp, and at least one internucleotidic linkage of formula I wherein P* is Sp.

[0890] In some embodiments, BA is optionally substituted C₁₋₃₀ cycloaliphatic. In some embodiments, BA is optionally substituted C₆₋₃₀ aryl. In some embodiments, BA is optionally substituted C₃₋₃₀ heterocyclyl. In some embodiments, BA is optionally substituted C₅₋₃₀ heteroaryl. In some embodiments, BA is an optionally substituted natural base moiety. In some embodiments, BA is an optionally substituted modified base moiety. BA is an optionally substituted group selected from C₁₋₃₀ cycloaliphatic, C₆₋₃₀ aryl, C₃₋₃₀ heterocyclyl, and C₅₋₃₀ heteroaryl. In some embodiments, BA is an optionally substituted group selected from C₁₋₃₀ cycloaliphatic, C₆₋₃₀ aryl, C₃₋₃₀ heterocyclyl, C₅₋₃₀ heteroaryl, and a natural nucleobase moiety.

[0891] In some embodiments, BA is connected to a sugar ring, e.g., Ring A, through an aromatic ring. In some embodiments, BA is connected to a sugar ring through a heteroatom. In some embodiments, BA is connected to a sugar ring through a ring heteroatom of an aromatic ring. In some embodiments, BA is connected to a sugar ring through a ring nitrogen atom of an aromatic ring.

[0892] In some embodiments, BA is a natural nucleobase moiety. In some embodiments, BA is an optionally substituted natural nucleobase moiety. In some embodiments, BA is a substituted natural nucleobase moiety. In some embodiments, BA is natural nucleobase A, T, U, C, or G. In some embodiments, BA is an optionally substituted group selected from natural nucleobases A, T, U, C, and G.

[0893] In some embodiments, R^{5E} is —H, —F, —Cl, —Br, —I, —CN, —N₃, —NO, —NO₂, -L-R′, -L-OR′, -L-SR′, -L-N(R′)₂, —O-L-OR′, —O-L-SR′, or —O-L-N(R′)₂. In some embodiments, R^{5E} is —H. In some embodiments, R^{5E} is —R. In some embodiments, R^{5E} is —CH₂OR. In some embodiments, R^{5E} is —CH₂OH. In some embodiments, R^{5E} is —CH₂OR, wherein R is a hydroxyl protecting group. In some embodiments, R is DMTr-.

[0894] In some embodiments, R^{s} is —H. In some embodiments, each R^{s} is independently —F, —Cl, —Br, —I, —CN, —N₃, —NO, —NO₂, -L-R′, -L-OR′, -L-SR′, -L-N(R′)₂, —O-L-OR′, —O-L-SR′, or —O-L-N(R′)₂. In some embodiments, R^{s} is —F. In some embodiments, R^{s} is —Cl. In some embodiments, R^{s} is —Br. In some embodiments, R^{s} is —I. In some embodiments, R^{s} is —CN. In some embodiments, R^{s} is —N₃. In some embodiments, R^{s} is —NO. In some embodiments, R^{s} is —NO₂. In some embodiments, R^{s} is -L-R′. In some embodiments, R^{s} is —R′. In some embodiments, R^{s} is -L-OR′. In some embodiments, R^{s} is —OR′. In some embodiments, R^{s} is -L-SR′. In some embodiments, R^{s} is —SR′. In some embodiments, R^{s} is L-L-N(R′)₂. In some embodiments, R^{s} is —N(R′)₂.

[0895] In some embodiments, R^{2s} is R^{s}, and R^{s} is a 2′-modification as described in the present disclosure.

[0896] In some embodiments, R^{s} at a 2′-position (BA is at 1′-position) is —F. In some embodiments, R^{s} at a 2′-position is —Cl. In some embodiments, R^{s} at a 2′-position is —Br. In some embodiments, R^{s} at a 2′-position is —I. In some embodiments, R^{s} at a 2′-position is —CN. In some embodiments, R^{s} at a 2′-position is —N₃. In some embodiments, R^{s} at a 2′-position is —NO. In some embodiments, R^{s} at a 2′-position is —NO₂. In some embodiments, R^{s} at a 2′-position is -L-R′. In some embodiments, R^{s} at a 2‘-position is —R’. In some embodiments, R^{s} at a 2′-position is -L-OR′. In some embodiments, R^{s} at a 2′-position is —OR′. In some embodiments, R^{s} at a 2′-position is -L-SR′. In some embodiments, R^{s} at a 2′-position is —SR′. In some embodiments, R^{s} at a 2′-position is L-L-N(R′)₂. In some embodiments, R^{s} at a 2′-position is —N(R′)₂. In some embodiments, R^{s} at a 2′-position is —OR′, wherein R′ is optionally substituted C₁₋₆ aliphatic. In some embodiments, R^{s} at a 2′-position is —OR′, wherein R′ is optionally substituted C₁₋₆ alkyl. In some embodiments, R^{s} at a 2′-position is —OMe. In some embodiments, R^{s} at a 2′-position is -MOE. In some embodiments, R^{s} at a 2′-position is hydrogen. In some embodiments, R^{s} at one 2′-position is hydrogen, and R^{s} at the other 2′-position is not hydrogen as described herein. In some embodiments, R^{s} at both 2′-positions are hydrogen. In some embodiments, R^{s} at one 2′-position is hydrogen, and the other 2′-position is connected to an internucleotidic linkage.

[0897] In some embodiments, R^{s} at a 3′-position (BA is at 1′-position) is —F. In some embodiments, R^{s} at a 3′-position is —Cl. In some embodiments, R^{s} at a 3′-position is —Br. In some embodiments, R^{s} at a 3′-position is —I. In some embodiments, R^{s} at a 3′-position is —CN. In some embodiments, R^{s} at a 3′-position is —N₃. In some embodiments, R^{s} at a 3′-position is —NO. In some embodiments, R^{s} at a 3′-position is —NO₂. In some embodiments, R^{s} at a 3′-position is -L-R′. In some embodiments, R^{s} at a 3‘-position is —R’. In some embodiments, R^{s} at a 3′-position is -L-OR′. In some embodiments, R^{s} at a 3′-position is —OR′. In some embodiments, R^{s} at a 3′-position is -L-SR′. In some embodiments, R^{s} at a 3′-position is —SR′. In some embodiments, R^{s} at a 3′-position is L-L-N(R′)₂. In some embodiments, R^{s} at a 3′-position is —N(R′)₂. In some embodiments, R^{s} at a 3′-position is —OR′, wherein R′ is optionally substituted C₁₋₆ aliphatic. In some embodiments, R^{s} at a 3′-position is —OR′, wherein R′ is optionally substituted C₁₋₆ alkyl. In some embodiments, R^{s} at a 3′-position is —OMe. In some embodiments, R^{s} at a 3′-position is -MOE. In some embodiments, R^{s} at a 3′-position is hydrogen. In some embodiments, R^{s} at one 3′-position is hydrogen, and R^{s} at the other 3′-position is not hydrogen as described herein. In some embodiments, R^{s} at both 3′-positions are hydrogen. In some embodiments, R^{s} at one 3′-position is hydrogen, and the other 3′-position is connected to an internucleotidic linkage.

[0898] In some embodiments, R^{s} at a 4′-position (BA is at 1′-position) is —F. In some embodiments, R^{s} at a 4′-position is —Cl. In some embodiments, R^{s} at a 4′-position is —Br. In some embodiments, R^{s} at a 4′-position is —I. In some embodiments, R^{s} at a 4′-position is —CN. In some embodiments, R^{s} at a 4′-position is —N₃. In some embodiments, R^{s} at a 4′-position is —NO. In some embodiments, R^{s} at a 4′-position is —NO₂. In some embodiments, R^{s} at a 4′-position is -L-R′. In some embodiments, R^{s} at a 4‘-position is —R’. In some embodiments, R^{s} at a 4′-position is -L-OR′. In some embodiments, R^{s} at a 4′-position is —OR′. In some embodiments, R^{s} at a 4′-position is -L-SR′. In some embodiments, R^{s} at a 4′-position is —SR′. In some embodiments, R^{s} at a 4′-position is L-L-N(R′)₂. In some embodiments, R^{s} at a 4′-position is —N(R′)₂. In some embodiments, R^{s} at a 4′-position is —OR′, wherein R′ is optionally substituted C₁₋₆ aliphatic. In some embodiments, R^{s} at a 4′-position is —OR′, wherein R′ is optionally substituted C₁₋₆ alkyl. In some embodiments, R^{s} at a 4′-position is —OMe. In some embodiments, R^{s} at a 4′-position is -MOE. In some embodiments, R^{s} at a 4′-position is hydrogen. In some embodiments, R^{s} at one 4′-position is hydrogen, and R^{s} at the other 4′-position is not hydrogen as described herein. In some embodiments, R^{s} at both 4′-positions are hydrogen. In some embodiments, R^{s} at one 4′-position is hydrogen, and the other 4′-position is connected to an internucleotidic linkage.

[0899] In some embodiments, s is 0-20. In some embodiments, s is 1-20. In some embodiments, s is 1. In some embodiments, s is 2. In some embodiments, s is 3. In some embodiments, s is 4. In some embodiments, s is 5. In some embodiments, s is 6. In some embodiments, s is 7. In some embodiments, s is 8. In some embodiments, s is 9. In some embodiments, s is 10. In some embodiments, s is 11. In some embodiments, s is 12. In some embodiments, s is 13. In some embodiments, s is 14. In some embodiments, s is 15. In some embodiments, s is 16. In some embodiments, s is 17. In some embodiments, s is 18. In some embodiments, s is 19. In some embodiments, s is 20.

[0900] In some embodiments, Cy^{L} is an optionally substituted tetravalent group selected from a C₃₋₂₀ cycloaliphatic ring, a C₆₋₂₀ aryl ring, a 5-20 membered heteroaryl ring having 1-10 heteroatoms independently selected from oxygen, nitrogen, sulfur, phosphorus and silicon, and a 3-20 membered heterocyclyl ring having 1-10 heteroatoms independently selected from oxygen, nitrogen, sulfur, phosphorus, boron and silicon (in addition to the four connections it already has). In some embodiments, Cy^{L} is an optionally substituted C₃₋₂₀ cycloaliphatic ring. In some embodiments, Cy^{L} is an optionally substituted C₆₋₂₀ aryl ring. In some embodiments, Cy^{L} is an optionally substituted 5-20 membered heteroaryl ring having 1-10 heteroatoms independently selected from oxygen, nitrogen, sulfur, phosphorus and silicon. In some embodiments, Cy^{L} is an optionally substituted 3-20 membered heterocyclyl ring having 1-10 heteroatoms independently selected from oxygen, nitrogen, sulfur, phosphorus, boron and silicon. In some embodiments, heteroatoms are selected from oxygen, nitrogen, sulfur and phosphorus. In some embodiments, heteroatoms are selected from oxygen, nitrogen and sulfur. In some embodiments, heteroatoms are selected from oxygen and nitrogen.

[0901] In some embodiments, Cy^{L} is Ring A as described herein. In some embodiments, —Cy- is bivalent Ring A. In some embodiments, —Cy- is a bivalent Cy^{L} group.

[0902] In some embodiments, Ring A is an optionally substituted 3-20 membered monocyclic, bicyclic or polycyclic ring having 0-10 heteroatoms independently selected from independently selected from oxygen, nitrogen, sulfur, phosphorus and silicon (in addition to the one or more connections as shown in a structure). In some embodiments, Ring A is an optionally substituted multivalent, monocyclic, bicyclic or polycyclic, saturated, partially unsaturated, or aryl 3-30 membered ring having, in addition to the intervening nitrogen, phosphorus and oxygen atoms, 0-10 heteroatoms independently selected from oxygen, nitrogen, sulfur, phosphorus and silicon. In some embodiments, Ring A is an optionally substituted multivalent, monocyclic, bicyclic or polycyclic, saturated, partially unsaturated, or aryl 3-30 membered ring having, in addition to the intervening nitrogen, phosphorus and oxygen atoms, 0-10 heteroatoms independently selected from oxygen, nitrogen, and sulfur.

[0903] In some embodiments, Ring A is an optionally substituted multivalent, monocyclic, bicyclic or polycyclic, saturated, partially unsaturated, or aryl 3-30 membered ring having, in addition to the intervening nitrogen, phosphorus and oxygen atoms, 0 heteroatom.

[0904] In some embodiments, Ring A is an optionally substituted multivalent monocyclic saturated 5-7 membered ring having the intervening nitrogen, phosphorus and oxygen atoms and no additional heteroatoms. In some embodiments, Ring A is an optionally substituted multivalent monocyclic saturated 5-membered ring having the intervening nitrogen, phosphorus and oxygen atoms and no additional heteroatoms. In some embodiments, Ring A is an optionally substituted multivalent monocyclic saturated 6-membered ring having the intervening nitrogen, phosphorus and oxygen atoms and no additional heteroatoms. In some embodiments, Ring A is an optionally substituted multivalent monocyclic saturated 7-membered ring having the intervening nitrogen, phosphorus and oxygen atoms and no additional heteroatoms.

[0905] In some embodiments, Ring A is an optionally substituted multivalent, bicyclic, saturated, partially unsaturated, or aryl 5-30 membered ring having, in addition to the intervening nitrogen, phosphorus and oxygen atoms, 0-10 heteroatoms independently selected from oxygen, nitrogen, sulfur, phosphorus and silicon. In some embodiments, Ring A is an optionally substituted multivalent, bicyclic, saturated, partially unsaturated, or aryl 5-30 membered ring having, in addition to the intervening nitrogen, phosphorus and oxygen atoms, 0-10 heteroatoms independently selected from oxygen, nitrogen, and sulfur. In some embodiments, Ring A is a multivalent, bicyclic and saturated 8-10 membered bicyclic ring having the intervening nitrogen, phosphorus and oxygen atoms and no additional heteroatoms. In some embodiments, Ring A is a multivalent, bicyclic and saturated 8-membered bicyclic ring having the intervening nitrogen, phosphorus and oxygen atoms and no additional heteroatoms. In some embodiments, Ring A is a multivalent, bicyclic and saturated 9-membered bicyclic ring having the intervening nitrogen, phosphorus and oxygen atoms and no additional heteroatoms. In some embodiments, Ring A is a multivalent, bicyclic and saturated 10-membered bicyclic ring having the intervening nitrogen, phosphorus and oxygen atoms and no additional heteroatoms. In some embodiments, Ring A is bicyclic and comprises a 5-membered ring fused to a 5-membered ring. In some embodiments, Ring A is bicyclic and comprises a 5-membered ring fused to a 6-membered ring. In some embodiments, the 5-membered ring comprises the intervening nitrogen, phosphorus and oxygen atoms as ring atoms. In some embodiments, Ring A comprises a ring system having the backbone structure of

[chemical structure]

[0906] In some embodiments, Ring A is an optionally substituted multivalent, polycyclic, saturated, partially unsaturated, or aryl 3-30 membered ring having, in addition to the intervening nitrogen, phosphorus and oxygen atoms, 0-10 heteroatoms independently selected from oxygen, nitrogen, sulfur, phosphorus and silicon. In some embodiments, Ring A is an optionally substituted multivalent, polycyclic, saturated, partially unsaturated, or aryl 3-30 membered ring having, in addition to the intervening nitrogen, phosphorus and oxygen atoms, 0-10 heteroatoms independently selected from oxygen, nitrogen, and sulfur.

[0907] In some embodiments, Ring A is monocyclic, bicyclic or polycyclic and comprises an optionally substituted 5-10 membered monocyclic ring whose ring atoms comprise the intervening nitrogen, phosphorus and oxygen atoms. In some embodiments, Ring A is monocyclic, bicyclic or polycyclic and comprises an optionally substituted 5-9 membered monocyclic ring whose ring atoms comprise the intervening nitrogen, phosphorus and oxygen atoms. In some embodiments, Ring A is monocyclic, bicyclic or polycyclic and comprises an optionally substituted 5-8 membered monocyclic ring whose ring atoms comprise the intervening nitrogen, phosphorus and oxygen atoms. In some embodiments, Ring A is monocyclic, bicyclic or polycyclic and comprises an optionally substituted 5-7 membered monocyclic ring whose ring atoms comprise the intervening nitrogen, phosphorus and oxygen atoms. In some embodiments, Ring A is monocyclic, bicyclic or polycyclic and comprises an optionally substituted 5-6 membered monocyclic ring whose ring atoms comprise the intervening nitrogen, phosphorus and oxygen atoms.

[0908] In some embodiments, Ring A is monocyclic, bicyclic or polycyclic and comprises an optionally substituted 5-membered monocyclic ring whose ring atoms comprise the intervening nitrogen, phosphorus and oxygen atoms. In some embodiments, Ring A is monocyclic, bicyclic or polycyclic and comprises an optionally substituted 6-membered monocyclic ring whose ring atoms comprise the intervening nitrogen, phosphorus and oxygen atoms. In some embodiments, Ring A is monocyclic, bicyclic or polycyclic and comprises an optionally substituted 7-membered monocyclic ring whose ring atoms comprise the intervening nitrogen, phosphorus and oxygen atoms. In some embodiments, Ring A is monocyclic, bicyclic or polycyclic and comprises an optionally substituted 8-membered monocyclic ring whose ring atoms comprise the intervening nitrogen, phosphorus and oxygen atoms. In some embodiments, Ring A is monocyclic, bicyclic or polycyclic and comprises an optionally substituted 9-membered monocyclic ring whose ring atoms comprise the intervening nitrogen, phosphorus and oxygen atoms. In some embodiments, Ring A is monocyclic, bicyclic or polycyclic and comprises an optionally substituted 10-membered monocyclic ring whose ring atoms comprise the intervening nitrogen, phosphorus and oxygen atoms.

[0909] In some embodiments, Ring A is monocyclic, bicyclic or polycyclic and comprises an optionally substituted 5-membered ring whose ring atoms consist of the intervening nitrogen, phosphorus and oxygen atoms and carbon atoms. In some embodiments, Ring A is monocyclic, bicyclic or polycyclic and comprises an optionally substituted 6-membered ring whose ring atoms consist of the intervening nitrogen, phosphorus and oxygen atoms and carbon atoms. In some embodiments, Ring A is monocyclic, bicyclic or polycyclic and comprises an optionally substituted 7-membered ring whose ring atoms consist of the intervening nitrogen, phosphorus and oxygen atoms and carbon atoms. In some embodiments, Ring A is monocyclic, bicyclic or polycyclic and comprises an optionally substituted 8-membered ring whose ring atoms consist of the intervening nitrogen, phosphorus and oxygen atoms and carbon atoms. In some embodiments, Ring A is monocyclic, bicyclic or polycyclic and comprises an optionally substituted 9-membered ring whose ring atoms consist of the intervening nitrogen, phosphorus and oxygen atoms and carbon atoms. In some embodiments, Ring A is monocyclic, bicyclic or polycyclic and comprises an optionally substituted 10-membered ring whose ring atoms consist of the intervening nitrogen, phosphorus and oxygen atoms and carbon atoms.

[0910] In some embodiments, Ring A comprises a ring system having the backbone structure of

[chemical structure]

[0911] In some embodiments, Ring A is optionally substituted

[chemical structure]

In some embodiments, Ring A is optionally substituted

[chemical structure]

[0912] In some embodiments, Ring A is

[chemical structure]

BA is connected at C1, and each of R^{1s}, R^{2s}, R^{3s}, R^{4s} and R^{5s} is independently R^{s}. In some embodiments, Ring A is

[chemical structure]

In some embodiments, Ring A is

[chemical structure]

wherein R^{2s} is not —OH. In some embodiments, Ring A is

[chemical structure]

wherein R^{2s} and R^{4s} are R, and the two R groups are taken together with their intervening atoms to form a ring. In some embodiments, Ring A is optionally substituted

[chemical structure]

In some embodiments, Ring A is

[chemical structure]

In some embodiments, Ring A is

[chemical structure]

In some embodiments, R^{2s} is a 2′-modification described in the present disclosure.

[0913] In some embodiments, L^{P} is an link. In some embodiments, each L^{P} independently has the structure of formula L-I. In some embodiments, each L^{P} independently has the structure of formula I. In some embodiments, L^{P} is a natural phosphate linkage. In some embodiments, L^{P} is a modified internucleotidic linkage. In some embodiments, L^{P} is chiral. In some embodiments, L^{P} is a phosphorothioate diester linkage.

[0914] In some embodiments, P^{L} is P(═W). In some embodiments, P^{L} is P(═O). In some embodiments, P^{L} is P(═S). In some embodiments, P^{L} is P(═Se). In some embodiments, P^{L} is P. In some embodiments, P^{L} is P→B(R′)₃.

[0915] In some embodiments, W, O or S or Se. In some embodiments, W is O or S. In some embodiments, W is O. In some embodiments, W is S. In some embodiments, W is Se.

[0916] In some embodiments, z is 1-1000. In some embodiments, z is 1-200. In some embodiments, z is 1-100. In some embodiments, z is 1-90. In some embodiments, z is 1-80. In some embodiments, z is 1-70. In some embodiments, z is 1-60. In some embodiments, z is 1-50. In some embodiments, z is 1-40. In some embodiments, z is 1-35. In some embodiments, z is 1-30. In some embodiments, z is 1-29. In some embodiments, z is 1-28. In some embodiments, z is 1-27. In some embodiments, z is 1-26. In some embodiments, z is 1-25. In some embodiments, z is 1-24. In some embodiments, z is 1-23. In some embodiments, z is 1-22. In some embodiments, z is 1-21. In some embodiments, z is 1-20. In some embodiments, z is 1-19. In some embodiments, z is 1-18. In some embodiments, z is 1-17. In some embodiments, z is 1-16. In some embodiments, z is 1-15. In some embodiments, z is 1-14. In some embodiments, z is 1-13. In some embodiments, z is 1-12. In some embodiments, z is 1-11. In some embodiments, z is 1-10. In some embodiments, z is 1-9. In some embodiments, z is 1-8. In some embodiments, z is 1-7. In some embodiments, z is 1-6. In some embodiments, z is 1-5. In some embodiments, z is 1-4. In some embodiments, z is 1-3. In some embodiments, z is 1-2. In some embodiments, z is 4-30. In some embodiments, z is 4-29. In some embodiments, z is 4-28. In some embodiments, z is 4-27. In some embodiments, z is 4-26. In some embodiments, z is 4-25. In some embodiments, z is 4-24. In some embodiments, z is 4-23. In some embodiments, z is 4-22. In some embodiments, z is 4-21. In some embodiments, z is 4-20. In some embodiments, z is 4-19. In some embodiments, z is 4-18. In some embodiments, z is 4-17. In some embodiments, z is 4-16. In some embodiments, z is 4-15. In some embodiments, z is 4-14. In some embodiments, z is 9-30. In some embodiments, z is 9-29. In some embodiments, z is 9-28. In some embodiments, z is 9-27. In some embodiments, z is 9-26. In some embodiments, z is 9-25. In some embodiments, z is 9-24. In some embodiments, z is 9-23. In some embodiments, z is 9-22. In some embodiments, z is 9-21. In some embodiments, z is 9-20. In some embodiments, z is 9-19. In some embodiments, z is 9-18. In some embodiments, z is 9-17. In some embodiments, z is 9-16. In some embodiments, z is 9-15. In some embodiments, z is 9-14. In some embodiments, z is 14-30. In some embodiments, z is 14-29. In some embodiments, z is 14-28. In some embodiments, z is 14-27. In some embodiments, z is 14-26. In some embodiments, z is 14-25. In some embodiments, z is 14-24. In some embodiments, z is 14-23. In some embodiments, z is 14-22. In some embodiments, z is 14-21. In some embodiments, z is 14-20. In some embodiments, z is 14-19. In some embodiments, z is 14-18. In some embodiments, z is 14-17. In some embodiments, z is 14-16. In some embodiments, z is 14-15.

[0917] In some embodiments, z is 1. In some embodiments, z is 2. In some embodiments, z is 3. In some embodiments, z is 4. In some embodiments, z is 5. In some embodiments, z is 6. In some embodiments, z is 7. In some embodiments, z is 8. In some embodiments, z is 9. In some embodiments, z is 10. In some embodiments, z is 11. In some embodiments, z is 12. In some embodiments, z is 13. In some embodiments, z is 14. In some embodiments, z is 15. In some embodiments, z is 16. In some embodiments, z is 17. In some embodiments, z is 18. In some embodiments, z is 19. In some embodiments, z is 20. In some embodiments, z is 21. In some embodiments, z is 22. In some embodiments, z is 23. In some embodiments, z is 24. In some embodiments, z is 25. In some embodiments, z is 26. In some embodiments, z is 27. In some embodiments, z is 28. In some embodiments, z is 29. In some embodiments, z is 30. In some embodiments, z is at least 2. In some embodiments, z is at least 3. In some embodiments, z is at least 4. In some embodiments, z is at least 5. In some embodiments, z is at least 6. In some embodiments, z is at least 7. In some embodiments, z is at least 8. In some embodiments, z is at least 9. In some embodiments, z is at least 10. In some embodiments, z is at least 11. In some embodiments, z is at least 12. In some embodiments, z is at least 13. In some embodiments, z is at least 14. In some embodiments, z is at least 15. In some embodiments, z is at least 16. In some embodiments, z is at least 17. In some embodiments, z is at least 18. In some embodiments, z is at least 19. In some embodiments, z is at least 20. In some embodiments, z is at least 21. In some embodiments, z is at least 22. In some embodiments, z is at least 23. In some embodiments, z is at least 24. In some embodiments, z is at least 25. In some embodiments, z is at least 26. In some embodiments, z is at least 27. In some embodiments, z is at least 28. In some embodiments, z is at least 29. In some embodiments, z is at least 30.

[0918] In some embodiments, L^{3E} is -L-. In some embodiments, L^{3E} is -L-L-. In some embodiments, L^{3E} is a covalent bond. In some embodiments, L^{3E} is —O—.

[0919] In some embodiments, R^{3E} is —R′. In some embodiments, R^{3E} is -L-R′. In some embodiments, R^{3E} is —OR′. In some embodiments, R^{3E} is a solid support.

[0920] In some embodiments, R^{3E} is —H. In some embodiments, -L³-R^{3E} is —H. In some embodiments, -L³-R^{3E} is —OH.

[0921] In some embodiments, R^{3E} is optionally substituted C₁₋₆ aliphatic. In some embodiments, R^{3E} is optionally substituted C₁₋₆ alkyl.

[0922] In some embodiments, R^{3E} is —OR′. In some embodiments, R^{3E} is —OH. In some embodiments, R^{3E} is —OR′, wherein R′ is not hydrogen. In some embodiments, R^{3E} is —OR′, wherein R′ is optionally substituted C₁₋₆ alkyl.

[0923] In some embodiments, R^{3E} is a solid support. In some embodiments, R^{3E} is a solid support for oligonucleotide synthesis. In some embodiments, R^{3E} is for delivery.

[0924] In some embodiments, W is O, S, or Se. In some embodiments, W is O. In some embodiments, W is S. In some embodiments, W is Se. In some embodiments, a CpG oligonucleotide comprises at least one internucleotidic linkage of formula I wherein W is O. In some embodiments, a CpG oligonucleotide comprises at least one internucleotidic linkage of formula I wherein W is S. In some embodiments, a CpG oligonucleotide comprises at least one internucleotidic linkage of formula I wherein W is Se.

[0925] In some embodiments, each R is independently —H, or an optionally substituted group selected from C₁₋₃₀ aliphatic, C₁₋₃₀ heteroaliphatic having 1-10 heteroatoms, C₆₋₃₀ aryl, C₆₋₃₀ arylaliphatic, C₆₋₃₀ arylheteroaliphatic having 1-10 heteroatoms, 5-30 membered heteroaryl having 1-10 heteroatoms, and 3-30 membered heterocyclyl having 1-10 heteroatoms, or
[0926] two R groups are optionally and independently taken together to form a covalent bond, or:
[0927] two or more R groups on the same atom are optionally and independently taken together with the atom to form an optionally substituted, 3-30 membered monocyclic, bicyclic or polycyclic ring having, in addition to the atom, 0-10 heteroatoms; or
[0928] two or more R groups on two or more atoms are optionally and independently taken together with their intervening atoms to form an optionally substituted, 3-30 membered monocyclic, bicyclic or polycyclic ring having, in addition to the intervening atoms, 0-10 heteroatoms.

[0929] In some embodiments, In some embodiments, each R is independently —H, or an optionally substituted group selected from C₁₋₃₀ aliphatic, C₁₋₃₀ heteroaliphatic having 1-10 heteroatoms, C₆₋₃₀ aryl, C₆₋₃₀ arylaliphatic, C₆₋₃₀ arylheteroaliphatic having 1-10 heteroatoms, 5-30 membered heteroaryl having 1-10 heteroatoms, and 3-30 membered heterocyclyl having 1-10 heteroatoms.

[0930] In some embodiments, two R groups are optionally and independently taken together to form a covalent bond.

[0931] In some embodiments, two or more R groups on the same atom are optionally and independently taken together with the atom to form an optionally substituted, 3-30 membered monocyclic, bicyclic or polycyclic ring having, in addition to the atom, 0-10 heteroatoms.

[0932] In some embodiments, two or more R groups on two or more atoms are optionally and independently taken together with their intervening atoms to form an optionally substituted, 3-30 membered monocyclic, bicyclic or polycyclic ring having, in addition to the intervening atoms, 0-10 heteroatoms.

[0933] In some embodiments, each R is independently hydrogen, or an optionally substituted group selected from C₁-C₆ aliphatic, carbocyclyl, aryl, heteroaryl, and heterocyclyl. In some embodiments, each R is independently hydrogen, or an optionally substituted group selected from C₁-C₆ aliphatic, phenyl, carbocyclyl, aryl, heteroaryl, and heterocyclyl.

[0934] In some embodiments, R is hydrogen. In some embodiments, R is an optionally substituted group selected from C₁-C₆ aliphatic, phenyl, carbocyclyl, aryl, heteroaryl, or heterocyclyl.

[0935] In some embodiments, R is an optionally substituted C₁-C₆ aliphatic. In some embodiments, R is an optionally substituted C₁-C₆ alkyl. In some embodiments, R is optionally substituted, linear or branched hexyl. In some embodiments, R is optionally substituted, linear or branched pentyl. In some embodiments, R is optionally substituted, linear or branched butyl. In some embodiments, R is optionally substituted, linear or branched propyl. In some embodiments, R is optionally substituted ethyl. In some embodiments, R is optionally substituted methyl.

[0936] In some embodiments, R is optionally substituted phenyl. In some embodiments, R is substituted phenyl. In some embodiments, R is phenyl.

[0937] In some embodiments, R is optionally substituted carbocyclyl. In some embodiments, R is optionally substituted C₃-C₁₀ carbocyclyl. In some embodiments, R is optionally substituted monocyclic carbocyclyl. In some embodiments, R is optionally substituted cycloheptyl. In some embodiments, R is optionally substituted cyclohexyl. In some embodiments, R is optionally substituted cyclopentyl. In some embodiments, R is optionally substituted cyclobutyl. In some embodiments, R is an optionally substituted cyclopropyl. In some embodiments, R is optionally substituted bicyclic carbocyclyl.

[0938] In some embodiments, R is an optionally substituted aryl. In some embodiments, R is an optionally substituted bicyclic aryl ring.

[0939] In some embodiments, R is an optionally substituted heteroaryl. In some embodiments, R is an optionally substituted 5-6 membered monocyclic heteroaryl ring having 1-3 heteroatoms independently selected from nitrogen, sulfur, or oxygen. In some embodiments, R is a substituted 5-6 membered monocyclic heteroaryl ring having 1-3 heteroatoms independently selected from nitrogen, oxygen, or sulfur. In some embodiments, R is an unsubstituted 5-6 membered monocyclic heteroaryl ring having 1-3 heteroatoms independently selected from nitrogen, sulfur, or oxygen.

[0940] In some embodiments, R is an optionally substituted 5 membered monocyclic heteroaryl ring having 1-3 heteroatoms independently selected from nitrogen, oxygen or sulfur. In some embodiments, R is an optionally substituted 6 membered monocyclic heteroaryl ring having 1-3 heteroatoms independently selected from nitrogen, oxygen, or sulfur.

[0941] In some embodiments, R is an optionally substituted 5-membered monocyclic heteroaryl ring having 1 heteroatom selected from nitrogen, oxygen, or sulfur. In some embodiments, R is selected from pyrrolyl, furanyl, or thienyl.

[0942] In some embodiments, R is an optionally substituted 5-membered heteroaryl ring having 2 heteroatoms independently selected from nitrogen, oxygen, or sulfur. In certain embodiments, R is an optionally substituted 5-membered heteroaryl ring having 1 nitrogen atom, and an additional heteroatom selected from sulfur or oxygen. Example R groups include optionally substituted pyrazolyl, imidazolyl, thiazolyl, isothiazolyl, oxazolyl or isoxazolyl.

[0943] In some embodiments, R is a 6-membered heteroaryl ring having 1-3 nitrogen atoms. In other embodiments, R is an optionally substituted 6-membered heteroaryl ring having 1-2 nitrogen atoms. In some embodiments, R is an optionally substituted 6-membered heteroaryl ring having 2 nitrogen atoms. In certain embodiments, R is an optionally substituted 6-membered heteroaryl ring having 1 nitrogen. Example R groups include optionally substituted pyridinyl, pyrimidinyl, pyrazinyl, pyridazinyl, triazinyl, or tetrazinyl.

[0944] In certain embodiments, R is an optionally substituted 8-10 membered bicyclic heteroaryl ring having 1-4 heteroatoms independently selected from nitrogen, oxygen, or sulfur. In some embodiments, R is an optionally substituted 5,6-fused heteroaryl ring having 1-4 heteroatoms independently selected from nitrogen, oxygen, or sulfur. In other embodiments, R is an optionally substituted 5,6-fused heteroaryl ring having 1-2 heteroatoms independently selected from nitrogen, oxygen, or sulfur. In certain embodiments, R is an optionally substituted 5,6-fused heteroaryl ring having 1 heteroatom independently selected from nitrogen, oxygen, or sulfur. In some embodiments, R is an optionally substituted indolyl. In some embodiments, R is an optionally substituted azabicyclo[3.2.1]octanyl. In certain embodiments, R is an optionally substituted 5,6-fused heteroaryl ring having 2 heteroatoms independently selected from nitrogen, oxygen, or sulfur. In some embodiments, R is an optionally substituted azaindolyl. In some embodiments, R is an optionally substituted benzimidazolyl. In some embodiments, R is an optionally substituted benzothiazolyl. In some embodiments, R is an optionally substituted benzoxazolyl. In some embodiments, R is an optionally substituted indazolyl. In certain embodiments, R is an optionally substituted 5,6-fused heteroaryl ring having 3 heteroatoms independently selected from nitrogen, oxygen, or sulfur.

[0945] In certain embodiments, R is an optionally substituted 6,6-fused heteroaryl ring having 1-4 heteroatoms independently selected from nitrogen, oxygen, or sulfur. In some embodiments, R is an optionally substituted 6,6-fused heteroaryl ring having 1-2 heteroatoms independently selected from nitrogen, oxygen, or sulfur. In other embodiments, R is an optionally substituted 6,6-fused heteroaryl ring having 1 heteroatom independently selected from nitrogen, oxygen, or sulfur. In some embodiments, R is an optionally substituted quinolinyl. In some embodiments, R is an optionally substituted isoquinolinyl. According to one aspect, R is an optionally substituted 6,6-fused heteroaryl ring having 2 heteroatoms independently selected from nitrogen, oxygen, or sulfur. In some embodiments, R is a quinazoline or a quinoxaline.

[0946] In some embodiments, R is an optionally substituted heterocyclyl. In some embodiments, R is an optionally substituted 3-7 membered saturated or partially unsaturated heterocyclic ring having 1-2 heteroatoms independently selected from nitrogen, oxygen, or sulfur. In some embodiments, R is a substituted 3-7 membered saturated or partially unsaturated heterocyclic ring having 1-2 heteroatoms independently selected from nitrogen, oxygen, or sulfur. In some embodiments, R is an unsubstituted 3-7 membered saturated or partially unsaturated heterocyclic ring having 1-2 heteroatoms independently selected from nitrogen, oxygen, or sulfur.

[0947] In some embodiments, R is an optionally substituted heterocyclyl. In some embodiments, R is an optionally substituted 6 membered saturated or partially unsaturated heterocyclic ring having 1-2 heteroatoms independently selected from nitrogen, oxygen, or sulfur. In some embodiments, R is an optionally substituted 6 membered partially unsaturated heterocyclic ring having 2 heteroatoms independently selected from nitrogen, oxygen, or sulfur. In some embodiments, R is an optionally substituted 6 membered partially unsaturated heterocyclic ring having 2 oxygen atom.

[0948] In certain embodiments, R is an optionally substituted 3-7 membered saturated or partially unsaturated heterocyclic ring having 1-2 heteroatoms independently selected from nitrogen, oxygen, or sulfur. In certain embodiments, R is optionally substituted oxiranyl, oxetanyl, tetrahydrofuranyl, tetrahydropyranyl, oxepaneyl, aziridineyl, azetidineyl, pyrrolidinyl, piperidinyl, azepanyl, thiiranyl, thietanyl, tetrahydrothiophenyl, tetrahydrothiopyranyl, thiepanyl, dioxolanyl, oxathiolanyl, oxazolidinyl, imidazolidinyl, thiazolidinyl, dithiolanyl, dioxanyl, morpholinyl, oxathianyl, piperazinyl, thiomorpholinyl, dithianyl, dioxepanyl, oxazepanyl, oxathiepanyl, dithiepanyl, diazepanyl, dihydrofuranonyl, tetrahydropyranonyl, oxepanonyl, pyrolidinonyl, piperidinonyl, azepanonyl, dihydrothiophenonyl, tetrahydrothiopyranonyl, thiepanonyl, oxazolidinonyl, oxazinanonyl, oxazepanonyl, dioxolanonyl, dioxanonyl, dioxepanonyl, oxathiolinonyl, oxathianonyl, oxathiepanonyl, thiazolidinonyl, thiazinanonyl, thiazepanonyl, imidazolidinonyl, tetrahydropyrimidinonyl, diazepanonyl, imidazolidinedionyl, oxazolidinedionyl, thiazolidinedionyl, dioxolanedionyl, oxathiolanedionyl, piperazinedionyl, morpholinedionyl, thiomorpholinedionyl, tetrahydropyranyl, tetrahydrofuranyl, morpholinyl, thiomorpholinyl, piperidinyl, piperazinyl, pyrrolidinyl, tetrahydrothiophenyl, or tetrahydrothiopyranyl. In some embodiments, R is an optionally substituted 5 membered saturated or partially unsaturated heterocyclic ring having 1-2 heteroatoms independently selected from nitrogen, oxygen, or sulfur.

[0949] In certain embodiments, R is an optionally substituted 5-6 membered partially unsaturated monocyclic ring having 1-2 heteroatoms independently selected from nitrogen, oxygen, or sulfur. In certain embodiments, R is an optionally substituted tetrahydropyridinyl, dihydrothiazolyl, dihydrooxazolyl, or oxazolinyl group.

[0950] In some embodiments, R is an optionally substituted 8-10 membered bicyclic saturated or partially unsaturated heterocyclic ring having 1-4 heteroatoms independently selected from nitrogen, oxygen, or sulfur. In some embodiments, R is an optionally substituted indolinyl. In some embodiments, R is an optionally substituted isoindolinyl. In some embodiments, R is an optionally substituted 1, 2, 3, 4-tetrahydroquinoline. In some embodiments, R is an optionally substituted 1, 2, 3, 4-tetrahydroisoquinoline.

[0951] In some embodiments, each R′ is independently —R, —C(O)R, —CO₂R, or —SO₂R, or:
[0952] two R′ on the same nitrogen are taken together with their intervening atoms to form an optionally substituted heterocyclic or heteroaryl ring, or
[0953] two R′ on the same carbon are taken together with their intervening atoms to form an optionally substituted aryl, carbocyclic, heterocyclic, or heteroaryl ring.

[0954] In some embodiments, R′ is —R, —C(O)R, —CO₂R, or —SO₂R, wherein R is as defined above and described herein.

[0955] In some embodiments, R′ is —R, wherein R is as defined and described above and herein. In some embodiments, R′ is hydrogen.

[0956] In some embodiments, R′ is —C(O)R, wherein R is as defined above and described herein. In some embodiments, R′ is —CO₂R, wherein R is as defined above and described herein. In some embodiments, R′ is —SO₂R, wherein R is as defined above and described herein.

[0957] In some embodiments, two R′ on the same nitrogen are taken together with their intervening atoms to form an optionally substituted heterocyclic or heteroaryl ring. In some embodiments, two R′ on the same carbon are taken together with their intervening atoms to form an optionally substituted aryl, carbocyclic, heterocyclic, or heteroaryl ring.

[0958] In some embodiments, —Cy- is an optionally substituted bivalent ring selected from carbocyclylene, arylene, heteroarylene, or heterocyclylene.

[0959] In some embodiments, —Cy- is optionally substituted phenylene. In some embodiments, —Cy- is optionally substituted carbocyclylene. In some embodiments, —Cy- is optionally substituted arylene. In some embodiments, —Cy- is optionally substituted heteroarylene. In some embodiments, —Cy- is optionally substituted heterocyclylene.

[0960] In some embodiments, each of X, Y and Z is independently —O—, —S—, —N(-L-R¹)—, or L, wherein each of L and R¹ is independently as defined above and described below.

[0961] In some embodiments, X is —O—. In some embodiments, X is —S—. In some embodiments, X is —O— or —S—. In some embodiments, a CpG oligonucleotide comprises at least one internucleotidic linkage of formula I wherein X is —O—. In some embodiments, a CpG oligonucleotide comprises at least one internucleotidic linkage of formula I wherein X is —S—. In some embodiments, a CpG oligonucleotide comprises at least one internucleotidic linkage of formula I wherein X is —O—, and at least one internucleotidic linkage of formula I wherein X is —S—. In some embodiments, a CpG oligonucleotide comprises at least one internucleotidic linkage of formula I wherein X is —O—, and at least one internucleotidic linkage of formula I wherein X is —S—, and at least one internucleotidic linkage of formula I wherein L is an optionally substituted, linear or branched C₁-C₁₀ alkylene, wherein one or more methylene units of L are optionally and independently replaced by an optionally substituted C₁-C₆ alkylene, C₁-C₆ alkenylene, —C≡C—, —C(R′)₂—, —Cy-, —O—, —S—, —S—S—, —N(R′)—, —C(O)—, —C(S)—, —C(NR′)—, —C(O)N(R′)—, —N(R′)C(O)N(R′)—, —N(R′)C(O)—, —N(R′)C(O)O—, —OC(O)N(R′)—, —S(O)—, —S(O)₂—, —S(O)₂N(R′)—, —N(R′)S(O)₂—, —SC(O)—, —C(O)S—, —OC(O)—, and —C(O)O—.

[0962] In some embodiments, X is —N(-L-R′)—. In some embodiments, X is —N(R′)—. In some embodiments, X is —N(R′)—. In some embodiments, X is —N(R)—. In some embodiments, X is —NH—.

[0963] In some embodiments, X is L. In some embodiments, X is a covalent bond. In some embodiments, X is or an optionally substituted, linear or branched C₁-C₁₀ alkylene, wherein one or more methylene units of L are optionally and independently replaced by an optionally substituted C₁-C₆ alkylene, C₁-C₆ alkenylene, —C≡C—, —C(R′)₂—, —Cy-, —O—, —S—, —S—S—, —N(R′)—, —C(O)—, —C(S)—, —C(NR′)—, —C(O)N(R′)—, —N(R′)C(O)N(R′)—, —N(R′)C(O)—, —N(R′)C(O)O—, —OC(O)N(R′)—, —S(O)—, —S(O)₂—, —S(O)₂N(R′)—, —N(R′)S(O)₂—, —SC(O)—, —C(O)S—, —OC(O)—, or —C(O)O—. In some embodiments, X is an optionally substituted C₁-C₁₀ alkylene or C₁-C₁₀ alkenylene. In some embodiments, X is methylene.

[0964] In some embodiments, Y is —O—. In some embodiments, Y is —S—.

[0965] In some embodiments, Y is —N(-L-R′)—. In some embodiments, Y is —N(R′)—. In some embodiments, Y is —N(R′)—. In some embodiments, Y is —N(R)—. In some embodiments, Y is —NH—.

[0966] In some embodiments, Y is L. In some embodiments, Y is a covalent bond. In some embodiments, Y is or an optionally substituted, linear or branched C₁-C₁₀ alkylene, wherein one or more methylene units of L are optionally and independently replaced by an optionally substituted C₁-C₆ alkylene, C₁-C₆ alkenylene, —C≡C—, —C(R′)₂—, —Cy-, —O—, —S—, —S—S—, —N(R′)—, —C(O)—, —C(S)—, —C(NR′)—, —C(O)N(R′)—, —N(R′)C(O)N(R′)—, —N(R′)C(O)—, —N(R′)C(O)O—, —OC(O)N(R′)—, —S(O)—, —S(O)₂—, —S(O)₂N(R′)—, —N(R′)S(O)₂—, —SC(O)—, —C(O)S—, —OC(O)—, or —C(O)O—. In some embodiments, Y is an optionally substituted C₁-C₁₀ alkylene or C₁-C₁₀ alkenylene. In some embodiments, Y is methylene.

[0967] In some embodiments, Z is —O—. In some embodiments, Z is —S—.

[0968] In some embodiments, Z is —N(-L-R′)—. In some embodiments, Z is —N(R′)—. In some embodiments, Z is —N(R′)—. In some embodiments, Z is —N(R)—. In some embodiments, Z is —NH—.

[0969] In some embodiments, Z is L. In some embodiments, Z is a covalent bond. In some embodiments, Z is or an optionally substituted, linear or branched C₁-C₁₀ alkylene, wherein one or more methylene units of L are optionally and independently replaced by an optionally substituted C₁-C₆ alkylene, C₁-C₆ alkenylene, —C≡C—, —C(R′)₂—, —Cy-, —O—, —S—, —S—S—, —N(R′)—, —C(O)—, —C(S)—, —C(NR′)—, —C(O)N(R′)—, —N(R′)C(O)N(R′)—, —N(R′)C(O)—, —N(R′)C(O)O—, —OC(O)N(R′)—, —S(O)—, —S(O)₂—, —S(O)₂N(R′)—, —N(R′)S(O)₂—, —SC(O)—, —C(O)S—, —OC(O)—, or —C(O)O—. In some embodiments, Z is an optionally substituted C₁-C₁₀ alkylene or C₁-C₁₀ alkenylene. In some embodiments, Z is methylene.

[0970] In some embodiments, L is a covalent bond, or a bivalent, optionally substituted, linear or branched group selected from a C₁₋₃₀ aliphatic group and a C₁₋₃₀ heteroaliphatic group having 1-10 heteroatoms, wherein one or more methylene units are optionally and independently replaced with C₁₋₆ alkylene, C₁₋₆ alkenylene, CEC, —C(R′)₂—, —O—, —S—, —S—S—, —N(R′)—, —C(O)—, —C(S)—, —C(NR′)—, —C(O)N(R′)—, —N(R′)C(O)N(R′)—, —N(R′)C(O)O—, —S(O)—, —S(O)₂—, —S(O)₂N(R′)—, —C(O)S—, —C(O)O—, —P(O)(OR′)—, —P(O)(SR′)—, —P(O)(R′)—, —P(O)(NR′)—, —P(S)(OR′)—, —P(S)(SR′)—, —P(S)(R′)—, —P(S)(NR′)—, —P(R′)—, —P(OR′)—, —P(SR′)—, —P(NR′)—, —P(OR′)[B(R′)₃]—, —OP(O)(OR′)O—, —OP(O)(SR′)O—, —OP(O)(R′)O—, —OP(O)(NR′)O—, —OP(OR′)O—, —OP(SR′)O—, —OP(NR′)O—, —OP(R′)O—, or —OP(OR′)[B(R′)₃]O—; and one or more carbon atoms are optionally and independently replaced with Cy^{L}. In some embodiments, L is a covalent bond, or a bivalent, optionally substituted, linear or branched group selected from a C₁₋₃₀ aliphatic group and a C₁₋₃₀ heteroaliphatic group having 1-10 heteroatoms independently selected from oxygen, nitrogen, sulfur, phosphorus, boron and silicon, wherein one or more methylene units are optionally and independently replaced with C₁₋₆ alkylene, C₁₋₆ alkenylene, CE-, —C(R′)₂—, —O—, —S—, —S—S—, —N(R′)—, —C(O)—, —C(S)—, —C(NR′)—, —C(O)N(R′)—, —N(R′)C(O)N(R′)—, —N(R′)C(O)O—, —S(O)—, —S(O)₂—, —S(O)₂N(R′)—, —C(O)S—, —C(O)O—, —P(O)(OR′)—, —P(O)(SR′)—, —P(O)(R′)—, —P(O)(NR′)—, —P(S)(OR′)—, —P(S)(SR′)—, —P(S)(R′)—, —P(S)(NR′)—, —P(R′)—, —P(OR′)—, —P(SR′)—, —P(NR′)—, —P(OR′)[B(R′)₃]—, —OP(O)(OR′)O—, —OP(O)(SR′)O—, —OP(O)(R′)O—, —OP(O)(NR′)O—, —OP(OR′)O—, —OP(SR′)O—, —OP(NR′)O—, —OP(R′)O—, or —OP(OR′)[B(R′)₃]O—; and one or more carbon atoms are optionally and independently replaced with Cy^{L}. In some embodiments, L is a covalent bond, or a bivalent, optionally substituted, linear or branched group selected from a C₁₋₃₀ aliphatic group and a C₁₋₃₀ heteroaliphatic group having 1-10 heteroatoms independently selected from oxygen, nitrogen, sulfur, phosphorus, boron and silicon, wherein one or more methylene units are optionally and independently replaced with C₁₋₆ alkylene, C₁₋₆ alkenylene, —C≡C—, —Cy-, —C(R′)₂—, —O—, —S—, —S—S—, —N(R′)—, —C(O)—, —C(S)—, —C(NR′)—, —C(O)N(R′)—, —N(R′)C(O)N(R′)—, —N(R′)C(O)O—, —S(O)—, —S(O)₂—, —S(O)₂N(R′)—, —C(O)S—, —C(O)O—, —P(O)(OR′)—, —P(O)(SR′)—, —P(O)(R′)—, —P(O)(NR′)—, —P(S)(OR′)—, —P(S)(SR′)—, —P(S)(R′)—, —P(S)(NR′)—, —P(R′)—, —P(OR′)—, —P(SR′)—, —P(NR′)—, —P(OR′)[B(R′)₃]—, —OP(O)(OR′)O—, —OP(O)(SR′)O—, —OP(O)(R′)O—, —OP(O)(NR′)O—, —OP(OR′)O—, —OP(SR′)O—, —OP(NR′)O—, —OP(R′)O—, or —OP(OR′)[B(R′)₃]O—. In some embodiments, L is a covalent bond, or a bivalent, optionally substituted, linear or branched group selected from a C₁₋₃₀ aliphatic group and a C₁₋₃₀ heteroaliphatic group having 1-10 heteroatoms independently selected from oxygen, nitrogen, sulfur, phosphorus, boron and silicon, wherein one or more methylene units are optionally and independently replaced with C₁₋₆ alkylene, C₁₋₆ alkenylene, —C≡C—, —C(R′)₂—, —O—, —S—, —S—S—, —N(R′)—, —C(O)—, —C(S)—, —C(NR′)—, —C(O)N(R′)—, —N(R′)C(O)N(R′)—, —N(R′)C(O)O—, —S(O)—, —S(O)₂—, —S(O)₂N(R′)—, —C(O)S—, —C(O)O—; and one or more carbon atoms are optionally and independently replaced with Cy^{L}. In some embodiments, L is a covalent bond, or a bivalent, optionally substituted, linear or branched group selected from a C₁₋₃₀ aliphatic group and a C₁₋₃₀ heteroaliphatic group having 1-10 heteroatoms independently selected from oxygen, nitrogen, sulfur, phosphorus, boron and silicon, wherein one or more methylene units are optionally and independently replaced with C₁₋₆ alkylene, C₁₋₆ alkenylene, —C≡C—, —Cy-, —C(R′)₂—, —O—, —S—, —S—S—, —N(R′)—, —C(O)—, —C(S)—, —C(NR′)—, —C(O)N(R′)—, —N(R′)C(O)N(R′)—, —N(R′)C(O)O—, —S(O)—, —S(O)₂—, —S(O)₂N(R′)—, —C(O)S—, —C(O)O—. In some embodiments, L is a covalent bond or an optionally substituted, linear or branched C₁-C₁₀ alkylene, wherein one or more methylene units of L are optionally and independently replaced by an optionally substituted group selected from C₁-C₆ alkylene, C₁-C₆ alkenylene, —C≡C—, a C₁₋₆ heteroaliphatic moiety, —C(R′)₂—, —Cy-, —O—, —S—, —S—S—, —N(R′)—, —C(O)—, —C(S)—, —C(NR′)—, —C(O)N(R′)—, —N(R′)C(O)N(R′)—, —N(R′)C(O)—, —N(R′)C(O)O—, —OC(O)N(R′)—, —S(O)—, —S(O)₂—, —S(O)₂N(R′)—, —N(R′)S(O)₂——SC(O)—, —C(O)S—, —OC(O)—, and —C(O)O—. In some embodiments, the aliphatic and/or the heteroaliphatic group is C₁₋₃₀. In some embodiments, the aliphatic and the heteroaliphatic group are independently C₁₋₃₀, C₁₋₂₅, C₁₋₂₀, C₁₋₁₅, C₁₋₁₀, C₁₋₉, C₁₋₈, C₁₋₇, C₁₋₆, C₁₋₅, C₁₋₄, C₁₋₃, C₁₋₂, or C₁. In some embodiments, the aliphatic group or the heteroaliphatic group is independently C₁₋₃₀, C₁₋₂₅, C₁₋₂₀, C₁₋₁₅, C₁₋₁₀, C₁₋₉, C₁₋₈, C₁₋₇, C₁₋₆, C₁₋₅, C₁₋₄, C₁₋₃, C₁₋₂, or C₁. In some embodiments, it is C₁. In some embodiments, it is C₂. In some embodiments, it is C₃. In some embodiments, it is C₄. In some embodiments, it is Cs. In some embodiments, it is C₆. In some embodiments, it is C₇. In some embodiments, it is C₈. In some embodiments, it is C₉. In some embodiments, it is C₁₀. In some embodiments, it is C₁₅. In some embodiments, it is C₂₀. In some embodiments, it is C₂₅. In some embodiments, L is a covalent bond.

[0971] In some embodiments, L is a covalent bond or an optionally substituted, linear or branched C₁-C₁₀ alkylene, wherein one or more methylene units of L are optionally and independently replaced by an optionally substituted C₁-C₆ alkylene, C₁-C₆ alkenylene, —C≡C—, —C(R′)₂—, —Cy-, —O—, —S—, —S—S—, —N(R′)—, —C(O)—, —C(S)—, —C(NR′)—, —C(O)N(R′)—, —N(R′)C(O)N(R′)—, —N(R′)C(O)—, —N(R′)C(O)O—, —OC(O)N(R′)—, —S(O)—, —S(O)₂—, —S(O)₂N(R′)—, —N(R′)S(O)₂—, —SC(O)—, —C(O)S—, —OC(O)—, or —C(O)O—.

[0972] In some embodiments, L is a covalent bond. In some embodiments, L is an optionally substituted, linear or branched C₁-C₁₀ alkylene, wherein one or more methylene units of L are optionally and independently replaced by an optionally substituted C₁-C₆ alkylene, C₁-C₆ alkenylene, —C≡C—, —C(R′)₂—, —Cy-, —O—, —S—, —S—S—, —N(R′)—, —C(O)—, —C(S)—, —C(NR′)—, —C(O)N(R′)—, —N(R′)C(O)N(R′)—, —N(R′)C(O)—, —N(R′)C(O)O—, —OC(O)N(R′)—, —S(O)—, —S(O)₂—, —S(O)₂N(R′)—, —N(R′)S(O)₂—, —SC(O)—, —C(O)S—, —OC(O)—, or —C(O)O—.

[0973] In some embodiments, L has the structure of -L¹-V—, wherein: L¹ is an optionally substituted group selected from

[chemical structure]

C₁-C₆ alkylene, C₁-C₆ alkenylene, carbocyclylene, arylene, C₁-C₆ heteroalkylene, heterocyclylene, and heteroarylene;
[0974] V is selected from —O—, —S—, —NR′—, C(R′)₂, —S—S—, —B—S—S—C—,

[chemical structure]

or an optionally substituted group selected from C₁-C₆ alkylene, arylene, C₁-C₆ heteroalkylene, heterocyclylene, and heteroarylene;
[0975] A is ═O, ═S, ═NR′, or ═C(R′)₂;
[0976] each of B and C is independently —O—, —S—, —NR′—, —C(R′)₂—, or an optionally substituted group selected from C₁-C₆ alkylene, carbocyclylene, arylene, heterocyclylene, or heteroarylene; and
[0977] each R′ is independently as defined above and described herein.

[0978] In some embodiments, L¹ is

[chemical structure]

[0979] In some embodiments, L¹ is

[chemical structure]

wherein Ring Cy′ is an optionally substituted arylene, carbocyclylene, heteroarylene, or heterocyclylene. In some embodiments, L¹ is optionally substituted

[chemical structure]

In some embodiments, L is

[chemical structure]

[0980] In some embodiments, L¹ is connected to X. In some embodiments, L¹ is an optionally substituted group selected from

[chemical structure]

[chemical structure]

and the sulfur atom is connect to V. In some embodiments, L¹ is an optionally substituted group selected from

[chemical structure]

and the carbon atom is connect to X.

[0981] In some embodiments, L has the structure of:

[chemical structure]

[0982] wherein:
[0983] E is —O—, —S—, —NR′— or —C(R′)₂—;
[0984] [symbol] is a single or double bond;
[0985] the two R^{L}1 are taken together with the two carbon atoms to which they are bound to form an optionally substituted aryl, carbocyclic, heteroaryl or heterocyclic ring; and each R′ is independently as defined above and described herein.

[0986] In some embodiments, L has the structure of:

[chemical structure]

[0987] wherein:
[0988] G is —O—, —S—, or —NR′;
[0989] [symbol] is a single or double bond; and
[0990] the two R^{L}1 are taken together with the two carbon atoms to which they are bound to form an optionally substituted aryl, C₃-C₁₀ carbocyclic, heteroaryl or heterocyclic ring.

[0991] In some embodiments, L has the structure of:

[chemical structure]

[0992] wherein:
[0993] E is —O—, —S—, —NR′— or —C(R′)₂—;
[0994] D is ═N—, ═C(F)—, ═C(Cl)—, ═C(Br)—, ═C(I)—, ═C(CN)—, ═C(NO₂)—, ═C(CO₂—(C₁-C₆ aliphatic))-, or ═C(CF₃)—; and
[0995] each R′ is independently as defined above and described herein.

[0996] In some embodiments, L has the structure of:

[chemical structure]

[0997] wherein:
[0998] G is —O—, —S—, or —NR′;
[0999] D is ═N—, ═C(F)—, ═C(Cl)—, ═C(Br)—, ═C(I)—, ═C(CN)—, ═C(NO₂)—, ═C(CO₂—(C₁-C₆ aliphatic))-, or ═C(CF₃)—.

[1000] In some embodiments, L has the structure of:

[chemical structure]

[1001] wherein:
[1002] E is —O—, —S—, —NR′— or —C(R′)₂—;
[1003] D is ═N—, ═C(F)—, ═C(Cl)—, ═C(Br)—, ═C(I)—, ═C(CN)—, ═C(NO₂)—, ═C(CO₂—(C₁-C₆ aliphatic))-, or ═C(CF₃)—; and
[1004] each R′ is independently as defined above and described herein.

[1005] In some embodiments, L has the structure of:

[chemical structure]

[1006] wherein:
[1007] G is —O—, —S—, or —NR′;
[1008] D is ═N—, ═C(F)—, ═C(Cl)—, ═C(Br)—, ═C(I)—, ═C(CN)—, ═C(NO₂)—, ═C(CO₂—(C₁-C₆ aliphatic))-, or ═C(CF₃)—.

[1009] In some embodiments, L has the structure of:

[chemical structure]

[1010] wherein:
[1011] E is —O—, —S—, —NR′— or —C(R′)₂—;
[1012] [symbol] is a single or double bond;
[1013] the two R^{L1} are taken together with the two carbon atoms to which they are bound to form an optionally substituted aryl, C₃-C₁₀ carbocyclic, heteroaryl or heterocyclic ring;
[1014] and each R′ is independently as defined above and described herein.

[1015] In some embodiments, L has the structure of:

[chemical structure]

[1016] wherein:
[1017] G is —O—, —S—, or —NR′;
[1018] [symbol] is a single or double bond;
[1019] the two R^{L1} are taken together with the two carbon atoms to which they are bound to form an optionally substituted aryl, C₃-C₁₀ carbocyclic, heteroaryl or heterocyclic ring;
[1020] and each R′ is independently as defined above and described herein.

[1021] In some embodiments, L has the structure of:

[chemical structure]

[1022] wherein:
[1023] E is —O—, —S—, —NR′— or —C(R′)₂—;
[1024] D is ═N—, ═C(F)—, ═C(Cl)—, ═C(Br)—, ═C(I)—, ═C(CN)—, ═C(NO₂)—, ═C(CO₂—(C₁-C₆ aliphatic))-, or ═C(CF₃)—; and
[1025] each R′ is independently as defined above and described herein.

[1026] In some embodiments, L has the structure of:

[chemical structure]

[1027] wherein:
[1028] G is —O—, —S—, or —NR′;
[1029] D is ═N—, ═C(F)—, ═C(Cl)—, ═C(Br)—, ═C(I)—, ═C(CN)—, ═C(NO₂)—, ═C(CO₂—(C₁-C₆ aliphatic))-, or ═C(CF₃)—; and
[1030] each R′ is independently as defined above and described herein.

[1031] In some embodiments, L has the structure of:

[chemical structure]

[1032] wherein:
[1033] E is —O—, —S—, —NR′— or —C(R′)₂—;
[1034] D is ═N—, ═C(F)—, ═C(Cl)—, ═C(Br)—, ═C(I)—, ═C(CN)—, ═C(NO₂)—, ═C(CO₂—(C₁-C₆ aliphatic))-, or ═C(CF₃)—; and
[1035] each R′ is independently as defined above and described herein.

[1036] In some embodiments, L has the structure of:

[chemical structure]

[1037] wherein:
[1038] G is —O—, —S—, or —NR′;
[1039] D is ═N—, ═C(F)—, ═C(Cl)—, ═C(Br)—, ═C(I)—, ═C(CN)—, ═C(NO₂)—, ═C(CO₂—(C₁-C₆ aliphatic))-, or ═C(CF₃)—; and
[1040] each R′ is independently as defined above and described herein.

[1041] In some embodiments, L has the structure of:

[chemical structure]

[1042] wherein:
[1043] E is —O—, —S—, —NR′— or —C(R′)₂—;
[1044] [symbol] is a single or double bond;
[1045] the two R^{L1} are taken together with the two carbon atoms to which they are bound to form an optionally substituted aryl, C₃-C₁₀ carbocyclic, heteroaryl or heterocyclic ring; and each R′ is independently as defined above and described herein.

[1046] In some embodiments, L has the structure of:

[chemical structure]

[1047] wherein:
[1048] G is —O—, —S—, or —NR′;
[1049] [symbol] is a single or double bond;
[1050] the two R^{L1} are taken together with the two carbon atoms to which they are bound to form an optionally substituted aryl, C₃-C₁₀ carbocyclic, heteroaryl or heterocyclic ring; and each R′ is independently as defined above and described herein.

[1051] In some embodiments, L has the structure of:

[chemical structure]

[1052] wherein:
[1053] E is —O—, —S—, —NR′— or —C(R′)₂—;
[1054] D is ═N—, ═C(F)—, ═C(Cl)—, ═C(Br)—, ═C(I)—, ═C(CN)—, ═C(NO₂)—, ═C(CO₂—(C₁-C₆ aliphatic))-, or ═C(CF₃)—; and
[1055] each R′ is independently as defined above and described herein.

[1056] In some embodiments, L has the structure of:

[chemical structure]

[1057] wherein:
[1058] G is —O—, —S—, or —NR′;
[1059] D is ═N—, ═C(F)—, ═C(Cl)—, ═C(Br)—, ═C(I)—, ═C(CN)—, ═C(NO₂)—, ═C(CO₂—(C₁-C₆ aliphatic))-, or ═C(CF₃)—; and
[1060] R′ is as defined above and described herein.

[1061] In some embodiments, L has the structure of:

[chemical structure]

[1062] wherein:
[1063] E is —O—, —S—, —NR′— or —C(R′)₂—;
[1064] D is ═N—, ═C(F)—, ═C(Cl)—, ═C(Br)—, ═C(I)—, ═C(CN)—, ═C(NO₂)—, ═C(CO₂—(C₁-C₆ aliphatic))-, or ═C(CF₃)—; and
[1065] each R′ is independently as defined above and described herein.

[1066] In some embodiments, L has the structure of:

[chemical structure]

[1067] wherein:
[1068] G is —O—, —S—, or —NR′;
[1069] D is ═N—, ═C(F)—, ═C(Cl)—, ═C(Br)—, ═C(I)—, ═C(CN)—, ═C(NO₂)—, ═C(CO₂—(C₁-C₆ aliphatic))-, or ═C(CF₃)—; and
[1070] R′ is as defined above and described herein.

[1071] In some embodiments, L has the structure of:

[chemical structure]

wherein the phenyl ring is optionally substituted. In some embodiments, the phenyl ring is not substituted. In some embodiments, the phenyl ring is substituted.

[1072] In some embodiments, L has the structure of:

[chemical structure]

wherein the phenyl ring is optionally substituted. In some embodiments, the phenyl ring is not substituted. In some embodiments, the phenyl ring is substituted.

[1073] In some embodiments, L has the structure of:

[chemical structure]

[1074] wherein:
[1075] [symbol] is a single or double bond; and
[1076] the two R^{L1} are taken together with the two carbon atoms to which they are bound to form an optionally substituted aryl, C₃-C₁₀ carbocyclic, heteroaryl or heterocyclic ring.

[1077] In some embodiments, L has the structure of:

[chemical structure]

[1078] wherein:
[1079] G is —O—, —S—, or —NR′;
[1080] [symbol] is a single or double bond; and
[1081] the two R^{L1} are taken together with the two carbon atoms to which they are bound to form an optionally substituted aryl, C₃-C₁₀ carbocyclic, heteroaryl or heterocyclic ring.

[1082] In some embodiments, E is —O—, —S—, —NR′— or —C(R′)₂—, wherein each R′ independently as defined above and described herein. In some embodiments, E is —O—, —S—, or —NR′—. In some embodiments, E is —O—, —S—, or —NH—. In some embodiments, E is —O—. In some embodiments, E is —S—. In some embodiments, E is —NH—.

[1083] In some embodiments, G is —O—, —S—, or —NR′, wherein each R′ independently as defined above and described herein. In some embodiments, G is —O—, —S—, or —NH—. In some embodiments, G is —O—. In some embodiments, G is —S—. In some embodiments, G is —NH—.

[1084] In some embodiments, L is -L³-G-, wherein:
[1085] L³ is an optionally substituted C₁-C₅ alkylene or alkenylene, wherein one or more methylene units are optionally and independently replaced by —O—, —S—, —N(R′)—, —C(O)—, —C(S)—, —C(NR′)—, —S(O)—, —S(O)₂—, or

[chemical structure]

and
[1086] wherein each of G, R′ and Ring Cy′ is independently as defined above and described herein.

[1087] In some embodiments, L is -L³-S—, wherein L³ is as defined above and described herein. In some embodiments, L is -L³-O—, wherein L³ is as defined above and described herein. In some embodiments, L is -L³-N(R′)—, wherein each of L³ and R′ is independently as defined above and described herein. In some embodiments, L is -L³-NH—, wherein each of L³ and R′ is independently as defined above and described herein.

[1088] In some embodiments, L³ is an optionally substituted C₅ alkylene or alkenylene, wherein one or more methylene units are optionally and independently replaced by —O—, —S—, —N(R′)—, —C(O)—, —C(S)—, —C(NR′)—, —S(O)—, —S(O)₂—, or

[chemical structure]

and each of R′ and Ring Cy′ is independently as defined above and described herein. In some embodiments, L³ is an optionally substituted C₅ alkylene. In some embodiments, -L³-G- is

[chemical structure]

[1089] In some embodiments, L³ is an optionally substituted C₄ alkylene or alkenylene, wherein one or more methylene units are optionally and independently replaced by —O—, —S—, —N(R′)—, —C(O)—, —C(S)—, —C(NR′)—, —S(O)—, —S(O)₂—, or

[chemical structure]

and each of R′ and Cy′ is independently as defined above and described herein.

[1090] In some embodiments, -L³-G is

[chemical structure]

[1091] In some embodiments, L³ is an optionally substituted C₃ alkylene or alkenylene, wherein one or more methylene units are optionally and independently replaced by —O—, —S—, —N(R′)—, —C(O)—, —C(S)—, —C(NR′)—, —S(O)—, —S(O)₂—, or

[chemical structure]

and each of R′ and Cy′ is independently as defined above and described herein.

[1092] In some embodiments, -L³-G- is

[chemical structure]

[1093] In some embodiments, L is

[chemical structure]

In some embodiments, L is

[chemical structure]

In some embodiments, L is

[chemical structure]

[1094] In some embodiments, L³ is an optionally substituted C₂ alkylene or alkenylene, wherein one or more methylene units are optionally and independently replaced by —O—, —S—, —N(R′)—, —C(O)—, —C(S)—, —C(NR′)—, —S(O)—, —S(O)₂—, or

[chemical structure]

and each of R′ and Cy′ is independently as defined above and described herein.

[1095] In some embodiments, -L³-G- is

[chemical structure]

wherein each of G and Cy′ is independently as defined above and described herein. In some embodiments, L is

[chemical structure]

[1096] In some embodiments, L is -L⁴-G-, wherein L⁴ is an optionally substituted C₁-C₂ alkylene; and G is as defined above and described herein. In some embodiments, L is -L⁴-G-, wherein L⁴ is an optionally substituted C₁-C₂ alkylene; G is as defined above and described herein; and G is connected to R¹. In some embodiments, L is -L⁴-G-, wherein L⁴ is an optionally substituted methylene; G is as defined above and described herein; and G is connected to R¹. In some embodiments, L is -L⁴-G-, wherein L⁴ is methylene; G is as defined above and described herein; and G is connected to R¹. In some embodiments, L is -L⁴-G-, wherein L⁴ is an optionally substituted —(CH₂)₂—; G is as defined above and described herein; and G is connected to R¹. In some embodiments, L is -L⁴-G-, wherein L⁴ is —(CH₂)₂—; G is as defined above and described herein; and G is connected to R¹.

[1097] In some embodiments, L is

[chemical structure]

wherein G is as defined above and described herein, and G is connected to R¹. In some embodiments, L is

[chemical structure]

wherein G is as defined above an er ed herein, and G is connected to R¹. In some embodiments, L is

[chemical structure]

wherein G is as defined above and described herein, and G is connected to R¹. In some embodiments, L is

[chemical structure]

wherein the sulfur atom is connected to R¹. In some embodiments, L is

[chemical structure]

wherein the oxygen atom is connected to R¹.

[1098] In some embodiments, L is

[chemical structure]

wherein G is as defined above and described herein.

[1099] In some embodiments, L is —S—R^{L3}— or —S—C(O)—R^{L3}—, wherein R^{L3} is an optionally substituted, linear or branched, C₁-C₉ alkylene, wherein one or more methylene units are optionally and independently replaced by an optionally substituted C₁-C₆ alkylene, C₁-C₆ alkenylene, —C≡C—, —C(R′)₂—, —Cy-, —O—, —S—, —S—S—, —N(R′)—, —C(O)—, —C(S)—, —C(NR′)—, —C(O)N(R′)—, —N(R′)C(O)N(R′)—, —N(R′)C(O)—, —N(R′)C(O)O—, —OC(O)N(R′)—, —S(O)—, —S(O)₂—, —S(O)₂N(R′)—, —N(R′)S(O)₂—, —SC(O)—, —C(O)S—, —OC(O)—, or —C(O)O—, wherein each of R′ and —Cy- is independently as defined above and described herein. In some embodiments, L is —S—R^{L3}— or —S—C(O)—R^{L3}—, wherein R^{L3} is an optionally substituted C₁-C₆ alkylene. In some embodiments, L is —S—R^{L3}— or —S—C(O)—R^{L3}—, wherein R^{L3} is an optionally substituted C₁-C₆ alkenylene. In some embodiments, L is —S—R^{L3}— or —S—C(O)—R^{L3}—, wherein R^{L3} is an optionally substituted C₁-C₆ alkylene wherein one or more methylene units are optionally and independently replaced by an optionally substituted C₁-C₆ alkenylene, arylene, or heteroarylene. In some embodiments, In some embodiments, R^{L3} is an optionally substituted —S—(C₁-C₆ alkenylene)-, —S—(C₁-C₆ alkylene)-, —S—(C₁-C₆ alkylene)-arylene-(C₁-C₆ alkylene)-, —S—CO-arylene-(C₁-C₆ alkylene)-, or —S—CO—(C₁-C₆ alkylene)-arylene-(C₁-C₆ alkylene)-.

[1100] In some embodiments, L is

[chemical structure]

[1101] In some embodiments L is

[chemical structure]

In some embodiments, L is

[chemical structure]

In some embodiments,

[chemical structure]

[1102] In some embodiments, the sulfur atom in the L embodiments described above and herein is connected to X. In some embodiments, the sulfur atom in the L embodiments described above and herein is connected to R¹.

[1103] In some embodiments, R¹ is -L-R, halogen, —CN, —NO₂, —Si(R)₃, —OR, —SR, or —N(R)₂. In some embodiments, R¹ is halogen, R, or an optionally substituted C₁-C₅₀ aliphatic wherein one or more methylene units are optionally and independently replaced by an optionally substituted C₁-C₆ alkylene, C₁-C₆ alkenylene, —C≡C—, —C(R′)₂—, —Cy-, —O—, —S—, —S—S—, —N(R′)—, —C(O)—, —C(S)—, —C(NR′)—, —C(O)N(R′)—, —N(R′)C(O)N(R′)—, —N(R′)C(O)—, —N(R′)C(O)O—, —OC(O)N(R′)—, —S(O)—, —S(O)₂—, —S(O)₂N(R′)—, —N(R′)S(O)₂—, —SC(O)—, —C(O)S—, —OC(O)—, or —C(O)O—, wherein each variable is independently as defined above and described herein. In some embodiments, R¹ is halogen, R, or an optionally substituted C₁-C₁₀ aliphatic wherein one or more methylene units are optionally and independently replaced by an optionally substituted C₁-C₆ alkylene, C₁-C₆ alkenylene, —C≡C—, —C(R′)₂—, —Cy-, —O—, —S—, —S—S—, —N(R′)—, —C(O)—, —C(S)—, —C(NR′)—, —C(O)N(R′)—, —N(R′)C(O)N(R′)—, —N(R′)C(O)—, —N(R′)C(O)O—, —OC(O)N(R′)—, —S(O)—, —S(O)₂—, —S(O)₂N(R′)—, —N(R′)S(O)₂—, —SC(O)—, —C(O)S—, —OC(O)—, or —C(O)O—, wherein each variable is independently as defined above and described herein.

[1104] In some embodiments, R¹ is hydrogen. In some embodiments, R¹ is halogen. In some embodiments, R¹ is —F. In some embodiments, R¹ is —Cl. In some embodiments, R¹ is —Br. In some embodiments, R¹ is —I.

[1105] In some embodiments, R¹ is R wherein R is as defined above and described herein.

[1106] In some embodiments, R¹ is hydrogen. In some embodiments, R¹ is an optionally substituted group selected from C1-C₅₀ aliphatic, phenyl, carbocyclyl, aryl, heteroaryl, or heterocyclyl.

[1107] In some embodiments, R¹ is an optionally substituted C₁-C₅₀ aliphatic. In some embodiments, R¹ is an optionally substituted C₁-C₁₀ aliphatic. In some embodiments, R¹ is an optionally substituted C₁-C₆ aliphatic. In some embodiments, R¹ is an optionally substituted C₁-C₆alkyl. In some embodiments, R¹ is optionally substituted, linear or branched hexyl. In some embodiments, R¹ is optionally substituted, linear or branched pentyl. In some embodiments, R¹ is optionally substituted, linear or branched butyl. In some embodiments, R¹ is optionally substituted, linear or branched propyl. In some embodiments, R¹ is optionally substituted ethyl. In some embodiments, R¹ is optionally substituted methyl.

[1108] In some embodiments, R¹ is optionally substituted phenyl. In some embodiments, R¹ is substituted phenyl. In some embodiments, R¹ is phenyl.

[1109] In some embodiments, R¹ is optionally substituted carbocyclyl. In some embodiments, R¹ is optionally substituted C₃-C₁₀ carbocyclyl. In some embodiments, R¹ is optionally substituted monocyclic carbocyclyl. In some embodiments, R¹ is optionally substituted cycloheptyl. In some embodiments, R¹ is optionally substituted cyclohexyl. In some embodiments, R¹ is optionally substituted cyclopentyl. In some embodiments, R¹ is optionally substituted cyclobutyl. In some embodiments, R¹ is an optionally substituted cyclopropyl. In some embodiments, R¹ is optionally substituted bicyclic carbocyclyl.

[1110] In some embodiments, R¹ is an optionally substituted C₁-C₅₀ polycyclic hydrocarbon. In some embodiments, R¹ is an optionally substituted C₁-C₅₀ polycyclic hydrocarbon wherein one or more methylene units are optionally and independently replaced by an optionally substituted C₁-C₆ alkylene, C₁-C₆ alkenylene, —C≡C—, —C(R′)₂—, —Cy-, —O—, —S—, —S—S—, —N(R′)—, —C(O)—, —C(S)—, —C(NR′)—, —C(O)N(R′)—, —N(R′)C(O)N(R′)—, —N(R′)C(O)—, —N(R′)C(O)O—, —OC(O)N(R′)—, —S(O)—, —S(O)₂—, —S(O)₂N(R′)—, —N(R′)S(O)₂—, —SC(O)—, —C(O)S—, —OC(O)—, or —C(O)O—, wherein each variable is independently as defined above and described herein. In some embodiments, R¹ is optionally substituted

[chemical structure]

In some embodiments, R¹ is

[chemical structure]

In some embodiments, R¹ is optionally substituted

[chemical structure]

[1111] In some embodiments, R¹ is an optionally substituted C₁-C₅₀ aliphatic comprising one or more optionally substituted polycyclic hydrocarbon moieties. In some embodiments, R¹ is an optionally substituted C₁-C₅₀ aliphatic comprising one or more optionally substituted polycyclic hydrocarbon moieties, wherein one or more methylene units are optionally and independently replaced by an optionally substituted C₁-C₆ alkylene, C₁-C₆ alkenylene, —C≡C—, —C(R′)₂—, —Cy-, —O—, —S—, —S—S—, —N(R′)—, —C(O)—, —C(S)—, —C(NR′)—, —C(O)N(R′)—, —N(R′)C(O)N(R′)—, —N(R′)C(O)—, —N(R′)C(O)O—, —OC(O)N(R′)—, —S(O)—, —S(O)₂—, —S(O)₂N(R′)—, —N(R′)S(O)₂—, —SC(O)—, —C(O)S—, —OC(O)—, or —C(O)O—, wherein each variable is independently as defined above and described herein. In some embodiments, R¹ is an optionally substituted C1-C₅₀ aliphatic comprising one or more optionally substituted

[chemical structure]

In some embodiments, R¹ is

[chemical structure]

In some embodiments, R¹ is

[chemical structure]

In some embodiments, R¹ is

[chemical structure]

In some embodiments, R¹ is

[chemical structure]

In some embodiments, R¹ is

[chemical structure]

[1112] In some embodiments, R¹ is an optionally substituted aryl. In some embodiments, R¹ is an optionally substituted bicyclic aryl ring.

[1113] In some embodiments, R¹ is an optionally substituted heteroaryl. In some embodiments, R¹ is an optionally substituted 5-6 membered monocyclic heteroaryl ring having 1-3 heteroatoms independently selected from nitrogen, sulfur, or oxygen. In some embodiments, R¹ is a substituted 5-6 membered monocyclic heteroaryl ring having 1-3 heteroatoms independently selected from nitrogen, oxygen, or sulfur. In some embodiments, R¹ is an unsubstituted 5-6 membered monocyclic heteroaryl ring having 1-3 heteroatoms independently selected from nitrogen, sulfur, or oxygen.

[1114] In some embodiments, R¹ is an optionally substituted 5 membered monocyclic heteroaryl ring having 1-3 heteroatoms independently selected from nitrogen, oxygen or sulfur. In some embodiments, R¹ is an optionally substituted 6 membered monocyclic heteroaryl ring having 1-3 heteroatoms independently selected from nitrogen, oxygen, or sulfur.

[1115] In some embodiments, R¹ is an optionally substituted 5-membered monocyclic heteroaryl ring having 1 heteroatom selected from nitrogen, oxygen, or sulfur. In some embodiments, R¹ is selected from pyrrolyl, furanyl, or thienyl.

[1116] In some embodiments, R¹ is an optionally substituted 5-membered heteroaryl ring having 2 heteroatoms independently selected from nitrogen, oxygen, or sulfur. In certain embodiments, R¹ is an optionally substituted 5-membered heteroaryl ring having 1 nitrogen atom, and an additional heteroatom selected from sulfur or oxygen. Example R¹ groups include optionally substituted pyrazolyl, imidazolyl, thiazolyl, isothiazolyl, oxazolyl or isoxazolyl.

[1117] In some embodiments, R¹ is a 6-membered heteroaryl ring having 1-3 nitrogen atoms. In other embodiments, R¹ is an optionally substituted 6-membered heteroaryl ring having 1-2 nitrogen atoms. In some embodiments, R¹ is an optionally substituted 6-membered heteroaryl ring having 2 nitrogen atoms. In certain embodiments, R¹ is an optionally substituted 6-membered heteroaryl ring having 1 nitrogen. Example R¹ groups include optionally substituted pyridinyl, pyrimidinyl, pyrazinyl, pyridazinyl, triazinyl, or tetrazinyl.

[1118] In certain embodiments, R¹ is an optionally substituted 8-10 membered bicyclic heteroaryl ring having 1-4 heteroatoms independently selected from nitrogen, oxygen, or sulfur. In some embodiments, R¹ is an optionally substituted 5,6-fused heteroaryl ring having 1-4 heteroatoms independently selected from nitrogen, oxygen, or sulfur. In other embodiments, R¹ is an optionally substituted 5,6-fused heteroaryl ring having 1-2 heteroatoms independently selected from nitrogen, oxygen, or sulfur. In certain embodiments, R¹ is an optionally substituted 5,6-fused heteroaryl ring having 1 heteroatom independently selected from nitrogen, oxygen, or sulfur. In some embodiments, R¹ is an optionally substituted indolyl. In some embodiments, R, is an optionally substituted azabicyclo[3.2.1]octanyl. In certain embodiments, R¹ is an optionally substituted 5,6-fused heteroaryl ring having 2 heteroatoms independently selected from nitrogen, oxygen, or sulfur. In some embodiments, R¹ is an optionally substituted azaindolyl. In some embodiments, R¹ is an optionally substituted benzimidazolyl. In some embodiments, R¹ is an optionally substituted benzothiazolyl. In some embodiments, R¹ is an optionally substituted benzoxazolyl. In some embodiments, R¹ is an optionally substituted indazolyl. In certain embodiments, R¹ is an optionally substituted 5,6-fused heteroaryl ring having 3 heteroatoms independently selected from nitrogen, oxygen, or sulfur.

[1119] In certain embodiments, R¹ is an optionally substituted 6,6-fused heteroaryl ring having 1-4 heteroatoms independently selected from nitrogen, oxygen, or sulfur. In some embodiments, R¹ is an optionally substituted 6,6-fused heteroaryl ring having 1-2 heteroatoms independently selected from nitrogen, oxygen, or sulfur. In other embodiments, R¹ is an optionally substituted 6,6-fused heteroaryl ring having 1 heteroatom independently selected from nitrogen, oxygen, or sulfur. In some embodiments, R¹ is an optionally substituted quinolinyl. In some embodiments, R¹ is an optionally substituted isoquinolinyl. According to one aspect, R¹ is an optionally substituted 6,6-fused heteroaryl ring having 2 heteroatoms independently selected from nitrogen, oxygen, or sulfur. In some embodiments, R¹ is a quinazoline or a quinoxaline.

[1120] In some embodiments, R¹ is an optionally substituted heterocyclyl. In some embodiments, R¹ is an optionally substituted 3-7 membered saturated or partially unsaturated heterocyclic ring having 1-2 heteroatoms independently selected from nitrogen, oxygen, or sulfur. In some embodiments, R¹ is a substituted 3-7 membered saturated or partially unsaturated heterocyclic ring having 1-2 heteroatoms independently selected from nitrogen, oxygen, or sulfur. In some embodiments, R¹ is an unsubstituted 3-7 membered saturated or partially unsaturated heterocyclic ring having 1-2 heteroatoms independently selected from nitrogen, oxygen, or sulfur.

[1121] In some embodiments, R¹ is an optionally substituted heterocyclyl. In some embodiments, R¹ is an optionally substituted 6 membered saturated or partially unsaturated heterocyclic ring having 1-2 heteroatoms independently selected from nitrogen, oxygen, or sulfur. In some embodiments, R¹ is an optionally substituted 6 membered partially unsaturated heterocyclic ring having 2 heteroatoms independently selected from nitrogen, oxygen, or sulfur. In some embodiments, R¹ is an optionally substituted 6 membered partially unsaturated heterocyclic ring having 2 oxygen atoms.

[1122] In certain embodiments, R¹ is a 3-7 membered saturated or partially unsaturated heterocyclic ring having 1-2 heteroatoms independently selected from nitrogen, oxygen, or sulfur. In certain embodiments, R¹ is oxiranyl, oxetanyl, tetrahydrofuranyl, tetrahydropyranyl, oxepaneyl, aziridineyl, azetidineyl, pyrrolidinyl, piperidinyl, azepanyl, thiiranyl, thietanyl, tetrahydrothiophenyl, tetrahydrothiopyranyl, thiepanyl, dioxolanyl, oxathiolanyl, oxazolidinyl, imidazolidinyl, thiazolidinyl, dithiolanyl, dioxanyl, morpholinyl, oxathianyl, piperazinyl, thiomorpholinyl, dithianyl, dioxepanyl, oxazepanyl, oxathiepanyl, dithiepanyl, diazepanyl, dihydrofuranonyl, tetrahydropyranonyl, oxepanonyl, pyrolidinonyl, piperidinonyl, azepanonyl, dihydrothiophenonyl, tetrahydrothiopyranonyl, thiepanonyl, oxazolidinonyl, oxazinanonyl, oxazepanonyl, dioxolanonyl, dioxanonyl, dioxepanonyl, oxathiolinonyl, oxathianonyl, oxathiepanonyl, thiazolidinonyl, thiazinanonyl, thiazepanonyl, imidazolidinonyl, tetrahydropyrimidinonyl, diazepanonyl, imidazolidinedionyl, oxazolidinedionyl, thiazolidinedionyl, dioxolanedionyl, oxathiolanedionyl, piperazinedionyl, morpholinedionyl, thiomorpholinedionyl, tetrahydropyranyl, tetrahydrofuranyl, morpholinyl, thiomorpholinyl, piperidinyl, piperazinyl, pyrrolidinyl, tetrahydrothiophenyl, or tetrahydrothiopyranyl. In some embodiments, R¹ is an optionally substituted 5 membered saturated or partially unsaturated heterocyclic ring having 1-2 heteroatoms independently selected from nitrogen, oxygen, or sulfur.

[1123] In certain embodiments, R¹ is an optionally substituted 5-6 membered partially unsaturated monocyclic ring having 1-2 heteroatoms independently selected from nitrogen, oxygen, or sulfur. In certain embodiments, R¹ is an optionally substituted tetrahydropyridinyl, dihydrothiazolyl, dihydrooxazolyl, or oxazolinyl group.

[1124] In some embodiments, R¹ is an optionally substituted 8-10 membered bicyclic saturated or partially unsaturated heterocyclic ring having 1-4 heteroatoms independently selected from nitrogen, oxygen, or sulfur. In some embodiments, R¹ is an optionally substituted indolinyl. In some embodiments, R¹ is an optionally substituted isoindolinyl. In some embodiments, R¹ is an optionally substituted 1, 2, 3, 4-tetrahydroquinoline. In some embodiments, R¹ is an optionally substituted 1, 2, 3, 4-tetrahydroisoquinoline.

[1125] In some embodiments, R¹ is an optionally substituted C₁-C₁₀ aliphatic wherein one or more methylene units are optionally and independently replaced by an optionally substituted C₁-C₆ alkylene, C₁-C₆ alkenylene, —C≡C—, —C(R′)₂—, —Cy-, —O—, —S—, —S—S—, —N(R′)—, —C(O)—, —C(S)—, —C(NR′)—, —C(O)N(R′)—, —N(R′)C(O)N(R′)—, —N(R′)C(O)—, —N(R′)C(O)O—, —OC(O)N(R′)—, —S(O)—, —S(O)₂—, —S(O)₂N(R′)—, —N(R′)S(O)₂—, —SC(O)—, —C(O)S—, —OC(O)—, or —C(O)O—, wherein each variable is independently as defined above and described herein. In some embodiments, R¹ is an optionally substituted C₁-C₁₀ aliphatic wherein one or more methylene units are optionally and independently replaced by an optionally —Cy-, —O—, —S—, —S—S—, —N(R′)—, —C(O)—, —C(S)—, —C(NR′)—, —C(O)N(R′)—, —N(R′)C(O)N(R′)—, —N(R′)C(O)—, —N(R′)C(O)O—, —OC(O)N(R′)—, —S(O)—, —S(O)₂—, —S(O)₂N(R′)—, —N(R′)S(O)₂—, —OC(O)—, or —C(O)O—, wherein each R′ is independently as defined above and described herein. In some embodiments, R¹ is an optionally substituted C₁-C₁₀ aliphatic wherein one or more methylene units are optionally and independently replaced by an optionally —Cy-, —O—, —S—, —S—S—, —N(R′)—, —C(O)—, —OC(O)—, or —C(O)O—, wherein each R′ is independently as defined above and described herein.

[1126] In some embodiments, R¹ is

[chemical structure]

[chemical structure]

[chemical structure]

[chemical structure]

[chemical structure]

[1127] In some embodiments, R¹ is

[chemical structure]

[1128] In some embodiments, R¹ comprises a terminal optionally substituted —(CH₂)₂— moiety which is connected to L. Example such R¹ groups are depicted below:

[chemical structure]

[1129] In some embodiments, R¹ comprises a terminal optionally substituted —(CH₂)₂— moiety which is connected to L. Exemplary such R¹ groups are depicted below:

[chemical structure]

[1130] In some embodiments, R¹ is —S—R^{L2}, wherein R^{L2} is an optionally substituted C₁—C₉ aliphatic wherein one or more methylene units are optionally and independently replaced by an optionally substituted C₁-C₆ alkylene, C₁-C₆ alkenylene, —C≡C—, —C(R′)₂—, —Cy-, —O—, —S—, —S—S—, —N(R′)—, —C(O)—, —C(S)—, —C(NR′)—, —C(O)N(R′)—, —N(R′)C(O)N(R′)—, —N(R′)C(O)—, —N(R′)C(O)O—, —OC(O)N(R′)—, —S(O)—, —S(O)₂—, —S(O)₂N(R′)—, —N(R′)S(O)₂—, —SC(O)—, —C(O)S—, —OC(O)—, or —C(O)O—, and each of R′ and —Cy- is independently as defined above and described herein. In some embodiments, R¹ is —S—R^{L2}, wherein the sulfur atom is connected with the sulfur atom in L group.

[1131] In some embodiments, R¹ is —C(O)—R^{L2}, wherein R^{L2} is an optionally substituted C₁-C₉ aliphatic wherein one or more methylene units are optionally and independently replaced by an optionally substituted C₁-C₆ alkylene, C₁-C₆ alkenylene, CEC, —C(R′)₂—, —Cy-, —O—, —S—, —S—S—, —N(R′)—, —C(O)—, —C(S)—, —C(NR′)—, —C(O)N(R′)—, —N(R′)C(O)N(R′)—, —N(R′)C(O)—, —N(R′)C(O)O—, —OC(O)N(R′)—, —S(O)—, —S(O)₂—, —S(O)₂N(R′)—, —N(R′)S(O)₂—, —SC(O)—, —C(O)S—, —OC(O)—, or —C(O)O—, and each of R′ and —Cy- is independently as defined above and described herein. In some embodiments, R¹ is —C(O)—R^{L2}, wherein the carbonyl group is connected with G in L group. In some embodiments, R¹ is —C(O)—R^{L2}, wherein the carbonyl group is connected with the sulfur atom in L group.

[1132] In some embodiments, R^{L2} is optionally substituted C₁-C₉ aliphatic. In some embodiments, R^{L2} is optionally substituted C₁-C₉ alkyl. In some embodiments, R^{L2} is optionally substituted C₁-C₉ alkenyl. In some embodiments, R^{L2} is optionally substituted C₁-C₉ alkynyl. In some embodiments, R^{L2} is an optionally substituted C₁-C₉ aliphatic wherein one or more methylene units are optionally and independently replaced by —Cy- or —C(O)—. In some embodiments, R^{L2} is an optionally substituted C₁-C₉ aliphatic wherein one or more methylene units are optionally and independently replaced by —Cy-. In some embodiments, R^{L2} is an optionally substituted C₁-C₉ aliphatic wherein one or more methylene units are optionally and independently replaced by an optionally substituted heterocyclylene. In some embodiments, R^{L2} is an optionally substituted C₁-C₉ aliphatic wherein one or more methylene units are optionally and independently replaced by an optionally substituted arylene. In some embodiments, R^{L2} is an optionally substituted C₁-C₉ aliphatic wherein one or more methylene units are optionally and independently replaced by an optionally substituted heteroarylene. In some embodiments, R^{L2} is an optionally substituted C₁-C₉ aliphatic wherein one or more methylene units are optionally and independently replaced by an optionally substituted C₃-C₁₀ carbocyclylene. In some embodiments, R^{L2} is an optionally substituted C₁-C₉ aliphatic wherein two methylene units are optionally and independently replaced by —Cy- or —C(O)—. In some embodiments, R^{L2} is an optionally substituted C₁-C₉ aliphatic wherein two methylene units are optionally and independently replaced by —Cy- or —C(O)—. Example R^{L2} groups are depicted below:

[chemical structure]

[1133] In some embodiments, R¹ is hydrogen, or an optionally substituted group selected from

[chemical structure]

—S—(C₁-C₁₀ aliphatic), C₁-C₁₀ aliphatic. aryl. C₁-C₆ heteroalkyl, heteroaryl and heterocyclyl. In some embodiments, R¹ is

[chemical structure]

or —S—(C₁-C₁₀ aliphatic). In some embodiments, R¹ is

[chemical structure]

[1134] In some embodiments, R¹ is an optionally substituted group selected from —S—(C₁-C₆ aliphatic), C₁-C₁₀ aliphatic, C₁-C₆ heteroaliphatic, aryl, heterocyclyl and heteroaryl.

[1135] In some embodiments, R¹ is

[chemical structure]

[1136] In some embodiments, the sulfur atom in the R¹ embodiments described above and herein is connected with the sulfur atom, G, E, or —C(O)— moiety in the L embodiments described above and herein. In some embodiments, the —C(O)— moiety in the R¹ embodiments described above and herein is connected with the sulfur atom, G, E, or —C(O)— moiety in the L embodiments described above and herein.

[1137] In some embodiments, -L-R¹ is any combination of the L embodiments and R¹ embodiments described above and herein.

[1138] In some embodiments, -L-R¹ is -L³-G-R¹ wherein each variable is independently as defined above and described herein.

[1139] In some embodiments, -L-R¹ is -L⁴-G-R¹ wherein each variable is independently as defined above and described herein.

[1140] In some embodiments, -L-R¹ is -L³-G-S—R^{L2}, wherein each variable is independently as defined above and described herein.

[1141] In some embodiments, -L-R¹ is -L³-G-C(O)—R^{L2}, wherein each variable is independently as defined above and described herein. In some embodiments, -L-R¹ is

[chemical structure]

wherein R^{L2} is an optionally substituted C₁-C₉ aliphatic wherein one or more methylene units are optionally and independently replaced by an optionally substituted C₁-C₆ alkylene, C₁-C₆ alkenylene, —C≡C—, —C(R′)₂—, —Cy-, —O—, —S—, —S—S—, —N(R′)—, —C(O)—, —C(S)—, —C(NR′)—, —C(O)N(R′)—, —N(R′)C(O)N(R′)—, —N(R′)C(O)—, —N(R′)C(O)O—, —OC(O)N(R′)—, —S(O)—, —S(O)₂—, —S(O)₂N(R′)—, —N(R′)S(O)₂—, —SC(O)—, —C(O)S—, —OC(O)—, or —C(O)O—, and each G is independently as defined above and described herein.

[1142] In some embodiments, -L-R¹ is —R^{L3}—S—S—R^{L2}, wherein each variable is independently as defined above and described herein. In some embodiments, -L-R¹ is —R^{L3}—C(O)—S—S—R^{L2}, wherein each variable is independently as defined above and described herein.

[1143] In some embodiments, -L-R¹ has the structure of:

[chemical structure]

wherein each variable is independently as defined above and described herein.

[1144] In some embodiments, -L-R¹ has the structure of:

[chemical structure]

wherein each variable is independently as defined above and described herein.

[1145] In some embodiments, -L-R¹ has the structure of:

[chemical structure]

wherein each variable is independently as defined above and described herein.

[1146] In some embodiments, -L-R¹ has the structure of:

[chemical structure]

wherein each variable is independently as defined above and described herein.

[1147] In some embodiments, -L-R¹ has the structure of:

[chemical structure]

wherein each variable is independently as defined above and described herein.

[1148] In some embodiments, -L-R¹ has the structure of:

[chemical structure]

wherein each variable is independently as defined above and described herein.

[1149] In some embodiments, -L-R¹ has the structure of:

[chemical structure]

wherein each variable is independently as defined above and described herein.

[1150] In some embodiments, -L-R¹ has the structure of:

[chemical structure]

wherein each variable is independently as defined above and described herein.

[1151] In some embodiments, -L-R¹ has the structure of:

[chemical structure]

wherein each variable is independently as defined above and described herein.

[1152] In some embodiments, -L-R¹ has the structure of:

[chemical structure]

wherein each variable is independently as defined above and described herein.

[1153] In some embodiments, -L-R¹ has the structure of:

[chemical structure]

wherein each variable is independently as defined above and described herein.

[1154] In some embodiments, -L-R¹ has the structure of:

[chemical structure]

wherein each variable is independently as defined above and described herein.

[1155] In some embodiments, -L-R¹ has the structure of:

[chemical structure]

wherein each variable is independently as defined above and described herein.

[1156] In some embodiments, -L-R¹ has the structure of:

[chemical structure]

wherein each variable is independently as defined above and described herein.

[1157] In some embodiments, -L-R¹ has the structure of:

[chemical structure]

wherein each variable is independently as defined above and described herein.

[1158] In some embodiments, -L-R¹ has the structure of:

[chemical structure]

wherein each variable is independently as defined above and described herein.

[1159] In some embodiments, -L-R¹ has the structure of:

[chemical structure]

wherein each variable is independently as defined above and described herein.

[1160] In some embodiments, -L-R¹ has the structure of:

[chemical structure]

wherein each variable is independently as defined above and described herein.

[1161] In some embodiments, -L-R¹ has the structure of:

[chemical structure]

wherein each variable is independently as defined above and described herein.

[1162] In some embodiments, -L-R¹ has the structure of:

[chemical structure]

wherein each variable is independently as defined above and described herein.

[1163] In some embodiments, -L-R¹ has the structure of:

[chemical structure]

wherein each variable is independently as defined above and described herein.

[1164] In some embodiments, L has the structure of:

[chemical structure]

wherein each variable is independently as defined above and described herein.

[1165] In some embodiments, —X-L-R¹ has the structure of:

[chemical structure]

[1166] wherein:
[1167] the phenyl ring is optionally substituted, and
[1168] each of R¹ and X is independently as defined above and described herein.

[1169] In some embodiments, -L-R¹ is

[chemical structure]

[chemical structure]

[chemical structure]

[chemical structure]

[1170] In some embodiments, -L-R¹ is:

[chemical structure]

[1171] In some embodiments, -L-R¹ is

[chemical structure]

In some embodiments, -L-R¹ is

[chemical structure]

[1172] In some embodiments, -L-R¹ comprises a terminal optionally substituted —(CH₂)₂— moiety which is connected to X. In some embodiments, -L-R¹ comprises a terminal —(CH₂)₂— moiety which is connected to X. Example such -L-R¹ moieties are depicted below:

[chemical structure]

[1173] In some embodiments, -L-R¹ comprises a terminal optionally substituted —(CH₂)— moiety which is connected to X. In some embodiments, -L-R¹ comprises a terminal —(CH₂)— moiety which is connected to X. Example such -L-R¹ moieties are depicted below:

[chemical structure]

[1174] In some embodiments, -L-R¹ is

[chemical structure]

[1175] In some embodiments, -L-R¹ is CH₃—,

[chemical structure]

### and X is —S—.

[1176] In some embodiments, -L-R¹ is CH₃—,

[chemical structure]

### X is —S—, W is O,

[1177] In some embodiments, R¹ is

[chemical structure]

[1178] In some embodiments, R¹ is

[chemical structure]

[1179] In some embodiments, X is —O— or —S—, and R¹ is

[chemical structure]

[1180] In some embodiments, X is —O— or —S—, and R¹ is

[chemical structure]

—S—(C₁-C₁₀ aliphatic) or —S—(C1-C₅₀ aliphatic).

[1181] In some embodiments, L is a covalent bond and -L-R¹ is R¹.

[1182] In some embodiments, -L-R¹ is not hydrogen.

[1183] In some embodiments, —X-L-R¹ is R¹ is

[chemical structure]

—S—(C₁-C₁₀ aliphatic) or —S—(C1-C₅₀ aliphatic).

[1184] In some embodiments, —X-L-R¹ has the structure of

[chemical structure]

wherein the

[chemical structure]

moiety is optionally substituted. In some embodiments, —X-L-R¹ is

[chemical structure]

In some embodiments, —X-L-R¹ is

[chemical structure]

In some embodiments, —X-L-R¹ is

[chemical structure]

In some embodiments, —X-L-R¹ has the structure of

[chemical structure]

wherein X′ is O or S, Y′ is —O—, —S— or —NR′—, and the

[chemical structure]

moiety is optionally substituted. In some embodiments, Y′ is —O—, —S— or —NH—. In some embodiments,

[chemical structure]

In some embodiments,

[chemical structure]

In some embodiments,

[chemical structure]

In some embodiments, —X-L-R¹ has the structure of

[chemical structure]

wherein X′ is 0 or S, and the

[chemical structure]

moiety is optionally substituted. In some embodiments,

[chemical structure]

In some embodiments, —X-L-R¹ is

[chemical structure]

wherein the

[chemical structure]

is optionally substituted. In some embodiments, —X-L-R¹ is

[chemical structure]

wherein the

[chemical structure]

is substituted. In some embodiments, —X-L-R¹ is

[chemical structure]

wherein the

[chemical structure]

is unsubstituted.

[1185] In some embodiments, —X-L-R¹ is R′—C(O)—S-L^{x}-S—, wherein L^{x} is an optionally substituted group selected from

[chemical structure]

In some embodiments, L^{x} is

[chemical structure]

In some embodiments, —X-L-R¹ is (CH₃)₃C—S—S-L^{x}-S—. In some embodiments, —X-L-R¹ is R¹—C(═X′)—Y′—C(R)₂—S-L^{x}-S—. In some embodiments, —X-L-R¹ is R—C(═X′)—Y′—CH₂—S-L^{X}-S—.
In some embodiments, —X-L-R¹ is

[chemical structure]

[1186] As will be appreciated by a person skilled in the art, many of the —X-L-R¹ groups described herein are cleavable and can be converted to —X after administration to a subject. In some embodiments, —X-L-R¹ is cleavable. In some embodiments, —X-L-R¹ is —S-L-R¹, and is converted to —S after administration to a subject. In some embodiments, the conversion is promoted by an enzyme of a subject. As appreciated by a person skilled in the art, methods of determining whether the —S-L-R¹ group is converted to —S⁻ after administration is widely known and practiced in the art, including those used for studying drug metabolism and pharmacokinetics.

[1187] In some embodiments, the internucleotidic linkage having the structure of formula I is

[chemical structure]

[1188] In some embodiments, the internucleotidic linkage of formula I has the structure of formula I-a:

[chemical structure]

wherein each variable is independently as defined above and described herein.

[1189] In some embodiments, the internucleotidic linkage of formula I has the structure of formula I-b:

[chemical structure]

wherein each variable is independently as defined above and described herein.

[1190] In some embodiments, the internucleotidic linkage of formula I is an phosphorothioate triester linkage having the structure of formula I-c:

[chemical structure]

[1191] wherein:
[1192] P* is an asymmetric phosphorus atom and is either Rp or Sp;
[1193] L is a covalent bond or an optionally substituted, linear or branched C₁-C₁₀ alkylene, wherein one or more methylene units of L are optionally and independently replaced by an optionally substituted C₁-C₆ alkylene, C₁-C₆ alkenylene, —C≡C—, —C(R′)₂—, —Cy-, —O—, —S—, —S—S—, —N(R′)—, —C(O)—, —C(S)—, —C(NR′)—, —C(O)N(R′)—, —N(R′)C(O)N(R′)—, —N(R′)C(O)—, —N(R′)C(O)O—, —OC(O)N(R′)—, —S(O)—, —S(O)₂—, —S(O)₂N(R′)—, —N(R′)S(O)₂—, —SC(O)—, —C(O)S—, —OC(O)—, or —C(O)O—;
[1194] R¹ is halogen, R, or an optionally substituted C₁-C₅₀ aliphatic wherein one or more methylene units are optionally and independently replaced by an optionally substituted C₁-C₆ alkylene, C₁-C₆ alkenylene, —C≡C—, —C(R′)₂—, —Cy-, —O—, —S—, —S—S—, —N(R′)—, —C(O)—, —C(S)—, —C(NR′)—, —C(O)N(R′)—, —N(R′)C(O)N(R′)—, —N(R′)C(O)—, —N(R′)C(O)O—, —OC(O)N(R′)—, —S(O)—, —S(O)₂—, —S(O)₂N(R′)—, —N(R′)S(O)₂—, —SC(O)—, —C(O)S—, —OC(O)—, or —C(O)O—;
[1195] each R′ is independently —R, —C(O)R, —CO₂R, or —SO₂R, or:
   [1196] two R′ on the same nitrogen are taken together with their intervening atoms to form an optionally substituted heterocyclic or heteroaryl ring, or
   [1197] two R′ on the same carbon are taken together with their intervening atoms to form an optionally substituted aryl, carbocyclic, heterocyclic, or heteroaryl ring;
[1198] —Cy- is an optionally substituted bivalent ring selected from phenylene, carbocyclylene, arylene, heteroarylene, or heterocyclylene;
[1199] each R is independently hydrogen, or an optionally substituted group selected from C₁-C₆ aliphatic, phenyl, carbocyclyl, aryl, heteroaryl, or heterocyclyl;
[1200] each

[chemical structure]

independently represents a connection to a nucleoside; and
[1201] R¹ is not —H when L is a covalent bond.

[1202] In some embodiments, the internucleotidic linkage having the structure of formula I is

[chemical structure]

[chemical structure]

[1203] In some embodiments, the internucleotidic linkage having the structure of formula I-c is

[chemical structure]

[1204] In some embodiments, the present disclosure provides a chirally controlled CpG oligonucleotide comprising one or more phosphate diester linkages, and one or more modified internucleotide linkages having the formula of I-a, I-b, or I-c.

[1205] In some embodiments, a modified internucleotidic linkage has the structure of I. In some embodiments, a modified internucleotidic linkage has the structure of I-a. In some embodiments, a modified internucleotidic linkage has the structure of I-b. In some embodiments, a modified internucleotidic linkage has the structure of I-c.

[1206] In some embodiments, a modified internucleotidic linkage is phosphorothioate. Examples of internucleotidic linkages having the structure of formula I are widely known in the art, including but not limited to those described in US 20110294124, US 20120316224, US 20140194610, US 20150211006, US 20150197540, WO 2015107425, PCT/US2016/043542, and PCT/US2016/043598, each of which is incorporated herein by reference.

[1207] Non-limiting examples of internucleotidic linkages also include those described in the art, including, but not limited to, those described in any of: Gryaznov, S.; Chen, J.-K. J. Am. Chem. Soc. 1994, 116, 3143, Jones et al. J. Org. Chem. 1993, 58, 2983, Koshkin et al. 1998 Tetrahedron 54: 3607-3630, Lauritsen et al. 2002 Chem. Comm. 5: 530-531, Lauritsen et al. 2003 Bioo. Med. Chem. Lett. 13: 253-256, Mesmaeker et al. Angew. Chem., Int. Ed. Engl. 1994, 33, 226, Petersen et al. 2003 TRENDS Biotech. 21: 74-81, Schultz et al. 1996 Nucleic Acids Res. 24: 2966, Ts'o et al. Ann. N. Y. Acad. Sci. 1988, 507, 220, and Vasseur et al. J. Am. Chem. Soc. 1992, 114, 4006.

[1208] In some embodiments, provided oligonucleotides in provided compositions, e.g., oligonucleotides of a first plurality, comprise base modifications, sugar modifications, and/or internucleotidic linkage modifications, wherein one or more modifications is enrichment of deuterium. In some embodiments, an oligonucleotide is deuterated at one or more of its sugars, nucleobases, internucleotidic linkages, lipid moieties, linker moieties, targeting components, etc. Such oligonucleotides can be used in any composition or method described herein.

[1209] CpG oligonucleotides of the provided technologies can be of various lengths. In some embodiments, provided CpG oligonucleotides comprise 5, 6, 7, 8, 9, 10, 11, 12, 13, 14, 15, 16, 17, 18, 19, 20, 21, 22, 23, 24, 25, 26, 27, 28, 29, 30, 40, 50 or more bases. In some embodiments, provided CpG oligonucleotides comprise 10, 11, 12, 13, 14, 15, 16, 17, 18, 19, 20, 21, 22, 23, 24, 25, 26, 27, 28, 29, 30, 40, 50 or more bases. In some embodiments, provided CpG oligonucleotides comprise 15, 16, 17, 18, 19, 20, 21, 22, 23, 24, 25, 26, 27, 28, 29, 30, 40, 50 or more bases. In some embodiments, provided CpG oligonucleotides comprise 15 or more bases. In some embodiments, provided CpG oligonucleotides comprise 16 or more bases. In some embodiments, provided CpG oligonucleotides comprise 17 or more bases. In some embodiments, provided CpG oligonucleotides comprise 18 or more bases. In some embodiments, provided CpG oligonucleotides comprise 19 or more bases. In some embodiments, provided CpG oligonucleotides comprise 20 or more bases. In some embodiments, provided CpG oligonucleotides comprise 21 or more bases. In some embodiments, provided CpG oligonucleotides comprise 22 or more bases. In some embodiments, provided CpG oligonucleotides comprise 23 or more bases. In some embodiments, provided CpG oligonucleotides comprise 24 or more bases. In some embodiments, provided CpG oligonucleotides comprise 25 or more bases. In some embodiments, provided CpG oligonucleotides comprise 26 or more bases. In some embodiments, provided CpG oligonucleotides comprise 27 or more bases. In some embodiments, provided CpG oligonucleotides comprise 28 or more bases. In some embodiments, provided CpG oligonucleotides comprise 29 or more bases. In some embodiments, provided CpG oligonucleotides comprise 30 or more bases. In some embodiments, provided CpG oligonucleotides comprise 40 or more bases. In some embodiments, provided CpG oligonucleotides comprise 50 or more bases. In some embodiments, provided CpG oligonucleotides are 15mers. In some embodiments, provided CpG oligonucleotides are 16mers. In some embodiments, provided CpG oligonucleotides are 17mers. In some embodiments, provided CpG oligonucleotides are 18mers. In some embodiments, provided CpG oligonucleotides are 19mers. In some embodiments, provided CpG oligonucleotides are 20mers. In some embodiments, provided CpG oligonucleotides are 21mers. In some embodiments, provided CpG oligonucleotides are 22mers. In some embodiments, provided CpG oligonucleotides are 23mers. In some embodiments, provided CpG oligonucleotides are 24mers. In some embodiments, provided CpG oligonucleotides are 25mers. In some embodiments, provided CpG oligonucleotides are 26mers. In some embodiments, provided CpG oligonucleotides are 27mers. In some embodiments, provided CpG oligonucleotides are 28mers. In some embodiments, provided CpG oligonucleotides are 29mers. In some embodiments, provided CpG oligonucleotides are 30mers.

[1210] In some embodiments, the present disclosure provides a chirally controlled CpG oligonucleotide comprising at least one phosphate diester internucleotidic linkage and at least one phosphorothioate triester linkage having the structure of formula I-c. In some embodiments, the present disclosure provides a chirally controlled CpG oligonucleotide comprising at least one phosphate diester internucleotidic linkage and at least two phosphorothioate triester linkages having the structure of formula I-c. In some embodiments, the present disclosure provides a chirally controlled CpG oligonucleotide comprising at least one phosphate diester internucleotidic linkage and at least three phosphorothioate triester linkages having the structure of formula I-c. In some embodiments, the present disclosure provides a chirally controlled CpG oligonucleotide comprising at least one phosphate diester internucleotidic linkage and at least four phosphorothioate triester linkages having the structure of formula I-c. In some embodiments, the present disclosure provides a chirally controlled CpG oligonucleotide comprising at least one phosphate diester internucleotidic linkage and at least five phosphorothioate triester linkages having the structure of formula I-c.

[1211] In some embodiments, a chirally controlled CpG oligonucleotide is designed such that one or more nucleotides comprise a phosphorus modification prone to “autorelease” under certain conditions. That is, under certain conditions, a particular phosphorus modification is designed such that it self-cleaves from the CpG oligonucleotide to provide, e.g., a phosphate diester such as those found in naturally occurring DNA and RNA. In some embodiments, such a phosphorus modification has a structure of —O-L-R¹, wherein each of L and R¹ is independently as defined above and described herein. In some embodiments, an autorelease group comprises a morpholino group. In some embodiments, an autorelease group is characterized by the ability to deliver an agent to the internucleotidic phosphorus linker, which agent facilitates further modification of the phosphorus atom such as, e.g., desulfurization. In some embodiments, the agent is water and the further modification is hydrolysis to form a phosphate diester as is found in naturally occurring DNA and RNA.

[1212] In some embodiments, a chirally controlled CpG oligonucleotide is designed such that the resulting pharmaceutical properties are improved through one or more particular modifications at phosphorus. It is well documented in the art that certain oligonucleotides are rapidly degraded by nucleases and exhibit poor cellular uptake through the cytoplasmic cell membrane (Poijarvi-Virta et al., Curr. Med. Chem. (2006), 13(28); 3441-65; Wagner et al., Med. Res. Rev. (2000), 20(6):417-51; Peyrottes et al., Mini Rev. Med. Chem. (2004), 4(4):395-408; Gosselin et al., (1996), 43(1):196-208; Bologna et al., (2002), Antisense & Nucleic Acid Drug Development 12:33-41). For instance, Vives et al., (Nucleic Acids Research (1999), 27(20):4071-76) found that tert-butyl SATE pro-oligonucleotides displayed markedly increased cellular penetration compared to the parent oligonucleotide.

[1213] In some embodiments, a modification at phosphorus results in a P-modification moiety characterized in that it acts as a pro-drug, e.g., the P-modification moiety facilitates delivery of a CpG oligonucleotide to a desired location prior to removal. For instance, in some embodiments, a P-modification moiety results from PEGylation at the linkage phosphorus. One of skill in the relevant arts will appreciate that various PEG chain lengths are useful and that the selection of chain length will be determined in part by the result that is sought to be achieved by PEGylation. For instance, in some embodiments, PEGylation is effected in order to reduce RES uptake and extend in vivo circulation lifetime of a CpG oligonucleotide.

[1214] In some embodiments, a PEGylation reagent for use in accordance with the present disclosure is of a molecular weight of about 300 g/mol to about 100,000 g/mol. In some embodiments, a PEGylation reagent is of a molecular weight of about 300 g/mol to about 10,000 g/mol. In some embodiments, a PEGylation reagent is of a molecular weight of about 300 g/mol to about 5,000 g/mol. In some embodiments, a PEGylation reagent is of a molecular weight of about 500 g/mol. In some embodiments, a PEGylation reagent of a molecular weight of about 1000 g/mol. In some embodiments, a PEGylation reagent is of a molecular weight of about 3000 g/mol. In some embodiments, a PEGylation reagent is of a molecular weight of about 5000 g/mol.

[1215] In certain embodiments, a PEGylation reagent is PEG500. In certain embodiments, a PEGylation reagent is PEG1000. In certain embodiments, a PEGylation reagent is PEG3000. In certain embodiments, a PEGylation reagent is PEG5000.

[1216] In some embodiments, a P-modification moiety is characterized in that it acts as a PK enhancer, e.g., lipids, PEGylated lipids, etc.

[1217] In some embodiments, a P-modification moiety is characterized in that it acts as an agent which promotes cell entry and/or endosomal escape, such as a membrane-disruptive lipid or peptide.

[1218] In some embodiments, a P-modification moiety is characterized in that it acts as a targeting agent. In some embodiments, a P-modification moiety is or comprises a targeting agent. The phrase “targeting agent,” as used herein, is an entity that is associates with a payload of interest (e.g., with a CpG oligonucleotide or oligonucleotide composition) and also interacts with a target site of interest so that the payload of interest is targeted to the target site of interest when associated with the targeting agent to a materially greater extent than is observed under otherwise comparable conditions when the payload of interest is not associated with the targeting agent. A targeting agent can be, or comprise, any of a variety of chemical moieties, including, for example, small molecule moieties, nucleic acids, polypeptides, carbohydrates, etc. Targeting agents are described further by Adarsh et al., “Organelle Specific Targeted Drug Delivery—A Review,” International Journal of Research in Pharmaceutical and Biomedical Sciences, 2011, p. 895.

[1219] Example such targeting agents include, but are not limited to, proteins (e.g. Transferrin), oligopeptides (e.g., cyclic and acylic RGD-containing oligopedptides), antibodies (monoclonal and polyclonal antibodies, e.g. IgG, IgA, IgM, IgD, IgE antibodies), sugars /carbohydrates (e.g., monosaccharides and/or oligosaccharides (mannose, mannose-6-phosphate, galactose, and the like)), vitamins (e.g., folate), or other small biomolecules. In some embodiments, a targeting moiety is a steroid molecule (e.g., bile acids including cholic acid, deoxycholic acid, dehydrocholic acid; cortisone; digoxigenin; testosterone; cholesterol; cationic steroids such as cortisone having a trimethylaminomethyl hydrazide group attached via a double bond at the 3-position of the cortisone ring, etc.). In some embodiments, a targeting moiety is a lipophilic molecule (e.g., alicyclic hydrocarbons, saturated and unsaturated fatty acids, waxes, terpenes, and polyalicyclic hydrocarbons such as adamantine and buckminsterfullerenes). In some embodiments, a lipophilic molecule is a terpenoid such as vitamin A, retinoic acid, retinal, or dehydroretinal. In some embodiments, a targeting moiety is a peptide.

[1220] In some embodiments, a P-modification moiety is a targeting agent of formula -—X-L-R¹ wherein each of X, L, and R¹ are as defined in Formula I above.

[1221] In some embodiments, a P-modification moiety is characterized in that it facilitates cell specific delivery.

[1222] In some embodiments, a P-modification moiety is characterized in that it falls into one or more of the above-described categories. For instance, in some embodiments, a P-modification moiety acts as a PK enhancer and a targeting ligand. In some embodiments, a P-modification moiety acts as a pro-drug and an endosomal escape agent. One of skill in the relevant arts would recognize that numerous other such combinations are possible and are contemplated by the present disclosure.

[1223] In some embodiments, a carbocyclyl, aryl, heteroaryl, or heterocyclyl group, or a bivalent or polyvalent group thereof, is a C₃-C₃₀ carbocyclyl, aryl, heteroaryl, or heterocyclyl group, or a bivalent and/or polyvalent group thereof.

### Lipids and Oligonucleotides Comprising Lipid Moieties

[1224] Among other things, the present disclosure encompasses the recognition that lipid conjugation can surprisingly improve properties of oligonucleotides. In some embodiments, the present disclosure provides oligonucleotides comprising one or more lipid moieties, and compositions and methods thereof. In some embodiments, lipid conjugation is optionally utilized together with other structural elements, such as base sequence, chemical modifications (e.g., sugar modifications, base modifications, internucleotidic linkage modifications), and/or stereochemistry, to improve oligonucleotide properties. In some embodiments, as demonstrated herein, provided oligonucleotides comprising lipid moieties have unexpected properties, such as immunological properties, activities toward their nucleic acid targets, delivery, pharmacokinetics, etc. In some embodiments, provided oligonucleotides comprising lipid moieties have low TLR9 agonist activities. In some embodiments, provided oligonucleotides comprising lipid moieties have surprisingly enhanced TLR9 antagonist activities, for example, compared to oligonucleotides absent lipid moieties. In some embodiments, provided oligonucleotides comprising lipid moieties possess unexpectedly high hTLR9 antagonist activities, in addition to improved activities, delivery, and/or pharmacokinetic properties (for examples, see FIGS. 23-26).

[1225] In some embodiments, in addition to TLR9-related property improvement, provided oligonucleotides comprising lipid moieties provide other improved properties. In some embodiments, provided oligonucleotides comprising lipid moieties provide improved delivery to muscles, e.g., gastrocnemius, triceps, heart, diaphragm, etc., compared to reference oligonucleotides, e.g., having no lipid moieties, having no lipid moieties and different stereochemistry (e.g., chirally controlled v. stereorandom, one pattern of backbone chiral centers v. another pattern of backbone chiral centers, etc.), etc. In some embodiments, provided oligonucleotides comprising lipid moieties provide improved pharmacokinetics compared to reference oligonucleotides. In some embodiments, provided oligonucleotides provides faster clearance from a system than reference oligonucleotides, which, as appreciated by a person having ordinary skill in the art, may provide lower toxicities compared to reference oligonucleotides.

[1226] In some embodiments, the present disclosure provides methods for modulating immunoactivities of an oligonucleotide, comprising adding a lipid moiety to the oligonucleotide. In some embodiments, the present disclosure provides methods for modulating immunoactivities of an oligonucleotide, comprising conjugating a lipid with an oligonucleotide. In some embodiments, the present disclosure provides methods for modulating TLR9 agonist activity of an oligonucleotide, comprising adding a lipid moiety to the oligonucleotide. In some embodiments, the present disclosure provides methods for modulating TLR9 agonist activity of an oligonucleotide, comprising conjugating a lipid with an oligonucleotide. In some embodiments, the present disclosure provides methods for decreasing TLR9 agonist activity of an oligonucleotide, comprising adding a lipid moiety to the oligonucleotide. In some embodiments, the present disclosure provides methods for decreasing TLR9 agonist activity of an oligonucleotide, comprising conjugating a lipid with an oligonucleotide. In some embodiments, the present disclosure provides methods for modulating TLR9 antagonist activity of an oligonucleotide, comprising adding a lipid moiety to the oligonucleotide. In some embodiments, the present disclosure provides methods for modulating TLR9 antagonist activity of an oligonucleotide, comprising conjugating a lipid with an oligonucleotide. In some embodiments, the present disclosure provides methods for increasing TLR9 antagonist activity of an oligonucleotide, comprising adding a lipid moiety to the oligonucleotide. In some embodiments, the present disclosure provides methods for increasing TLR9 antagonist activity of an oligonucleotide, comprising conjugating a lipid with an oligonucleotide. In some embodiments, an oligonucleotide without a lipid moiety, for example, those described herein, is converted into an oligonucleotide comprising a lipid moiety, for example, those described herein, for improved properties.

[1227] Many lipids can be utilized in provided technologies in accordance with the present disclosure. In some embodiments, a lipid comprises an optionally substituted, C₁₀-C₈₀ saturated or partially unsaturated aliphatic group, wherein one or more methylene units are optionally and independently replaced by an optionally substituted group selected from C₁-C₆ alkylene, C₁-C₆ alkenylene, —C≡C—, a C₁-C₆ heteroaliphatic moiety, —C(R′)₂—, —Cy-, —O—, —S—, —S—S—, —N(R′)—, —C(O)—, —C(S)—, —C(NR′)—, —C(O)N(R′)—, —N(R′)C(O)N(R′)—, —N(R′)C(O)—, —N(R′)C(O)O—, —OC(O)N(R′)—, —S(O)—, —S(O)₂—, —S(O)₂N(R′)—, —N(R′)S(O)₂—, —SC(O)—, —C(O)S—, —OC(O)—, and —C(O)O—, wherein each variable is independently as defined and described herein. In some embodiments, a lipid comprises an optionally substituted C₁₀-C₈₀ saturated or partially unsaturated, aliphatic chain. In some embodiments, a lipid comprises an optionally substituted C₁₀-C₈₀ linear, saturated or partially unsaturated, aliphatic chain. In some embodiments, a lipid comprises a C₁₀-C₈₀ linear, saturated or partially unsaturated, aliphatic chain, optionally substituted with one or more C₁₋₄ aliphatic group. In some embodiments, a lipid comprises an unsubstituted C₁₀-C₈₀ linear, saturated or partially unsaturated, aliphatic chain. In some embodiments, a lipid comprises no more than one optionally substituted C₁₀-C₈₀ linear, saturated or partially unsaturated, aliphatic chain. In some embodiments, a lipid comprises two or more optionally substituted C₁₀-C₈₀ linear, saturated or partially unsaturated, aliphatic chain.

[1228] In some embodiments, a lipid comprises an optionally substituted, C₁₀-C₆₀ saturated or partially unsaturated aliphatic group, wherein one or more methylene units are optionally and independently replaced by an optionally substituted group selected from C₁-C₆ alkylene, C₁-C₆ alkenylene, —C≡C—, a C₁-C₆ heteroaliphatic moiety, —C(R′)₂—, —Cy-, —O—, —S—, —S—S—, —N(R′)—, —C(O)—, —C(S)—, —C(NR′)—, —C(O)N(R′)—, —N(R′)C(O)N(R′)—, —N(R′)C(O)—, —N(R′)C(O)O—, —OC(O)N(R′)—, —S(O)—, —S(O)₂—, —S(O)₂N(R′)—, —N(R′)S(O)₂—, —SC(O)—, —C(O)S—, —OC(O)—, and —C(O)O—, wherein each variable is independently as defined and described herein. In some embodiments, a lipid comprises an optionally substituted C₁₀-C₆₀ saturated or partially unsaturated, aliphatic chain. In some embodiments, a lipid comprises an optionally substituted C₁₀-C₆₀ linear, saturated or partially unsaturated, aliphatic chain. In some embodiments, a lipid comprises a C₁₀-C₆₀ linear, saturated or partially unsaturated, aliphatic chain, optionally substituted with one or more C₁₋₄ aliphatic group. In some embodiments, a lipid comprises an unsubstituted C₁₀-C₆₀ linear, saturated or partially unsaturated, aliphatic chain. In some embodiments, a lipid comprises no more than one optionally substituted C₁₀-C₆₀ linear, saturated or partially unsaturated, aliphatic chain. In some embodiments, a lipid comprises two or more optionally substituted C₁₀-C₆₀ linear, saturated or partially unsaturated, aliphatic chain.

[1229] In some embodiments, a lipid comprises an optionally substituted, C₁₀-C₄₀ saturated or partially unsaturated aliphatic group, wherein one or more methylene units are optionally and independently replaced by an optionally substituted group selected from C₁-C₆ alkylene, C₁-C₆ alkenylene, —C≡C—, a C₁-C₆ heteroaliphatic moiety, —C(R′)₂—, —Cy-, —O—, —S—, —S—S—, —N(R′)—, —C(O)—, —C(S)—, —C(NR′)—, —C(O)N(R′)—, —N(R′)C(O)N(R′)—, —N(R′)C(O)—, —N(R′)C(O)O—, —OC(O)N(R′)—, —S(O)—, —S(O)₂—, —S(O)₂N(R′)—, —N(R′)S(O)₂—, —SC(O)—, —C(O)S—, —OC(O)—, and —C(O)O—, wherein each variable is independently as defined and described herein. In some embodiments, a lipid comprises an optionally substituted C₁₀-C₄₀ saturated or partially unsaturated, aliphatic chain. In some embodiments, a lipid comprises an optionally substituted C₁₀-C₄₀ linear, saturated or partially unsaturated, aliphatic chain. In some embodiments, a lipid comprises an unsubstituted C₁₀-C₄₀ linear, saturated or partially unsaturated, aliphatic chain. In some embodiments, a lipid comprises two or more optionally substituted C₁₀-C₄₀ linear, saturated or partially unsaturated, aliphatic chain. In some embodiments, a lipid comprises no more than one optionally substituted C₁₀-C₄₀ linear, saturated or partially unsaturated, aliphatic chain.

[1230] In some embodiments, the present disclosure provides an oligonucleotide comprising a lipid moiety comprising a C₁₀-C₈₀ linear, saturated or partially unsaturated, aliphatic chain. In some embodiments, the present disclosure provides an oligonucleotide comprising a lipid moiety comprising a C₁₀-C₈₀ linear, saturated or partially unsaturated, aliphatic chain, optionally substituted with one or more C₁₋₄ aliphatic group. In some embodiments, the present disclosure provides an oligonucleotide comprising a lipid moiety comprising a C₁₀-C₆₀ linear, saturated or partially unsaturated, aliphatic chain. In some embodiments, the present disclosure provides an oligonucleotide comprising a lipid moiety comprising a C₁₀-C₆₀ linear, saturated or partially unsaturated, aliphatic chain, optionally substituted with one or more C₁₋₄ aliphatic group. In some embodiments, the present disclosure provides an oligonucleotide comprising a lipid moiety comprising a C₁₀-C₄₀ linear, saturated or partially unsaturated, aliphatic chain. In some embodiments, the present disclosure provides an oligonucleotide comprising a lipid moiety comprising a C₁₀-C₄₀ linear, saturated or partially unsaturated, aliphatic chain, optionally substituted with one or more C₁₋₄ aliphatic group.

[1231] In some embodiments, the present disclosure provides a chirally controlled oligonucleotide composition comprising a plurality of oligonucleotides, which share:
[1232] 1) a common base sequence;
[1233] 2) a common pattern of backbone linkages; and
[1234] 3) a common pattern of backbone phosphorus modifications;
   wherein:
[1235] the composition is chirally controlled in that the plurality of oligonucleotides share the same stereochemistry at one or more chiral internucleotidic linkages, and at least 0.5%, 1%, 2%, 3%, 4%, 5%, 6%, 7%, 8%, 9%, 10%, 15%, 20%, 25%, 30%, 35%, 40%, 45%, 50%, 55%, 60%, 65%, 70%, 75%, 80%, 85%, 90%, 91%, 92%, 93%, 94%, 95%, 96%, 97%, 98% or 99% of oligonucleotides in the composition that share the common base sequence, the common pattern of backbone linkages; and the common pattern of backbone phosphorus modifications share the same stereochemistry at the one or more chiral internucleotidic linkages;
[1236] one or more oligonucleotides of the plurality are independently conjugated to a lipid; and one or more oligonucleotides of the plurality are optionally and independently conjugated to a target component.

[1237] In some embodiments, the percentage is at least 10%. In some embodiments, the plurality of oligonucleotides share the same stereochemistry independently at five or more chiral internucleotidic linkages. In some embodiments, the plurality of oligonucleotides share the same stereochemistry independently at ten or more chiral internucleotidic linkages. In some embodiments, the plurality of oligonucleotides share the same stereochemistry independently at ten or more chiral internucleotidic linkages, and the percentage is at least 10%.

[1238] In some embodiments, the present disclosure provides an oligonucleotide composition comprising a plurality of oligonucleotides having the structure of:

[chemical structure]

wherein:
[1239] A^{c} is an oligonucleotide chain ([H]_{b}—Ac is an oligonucleotide);
[1240] a is 1-1000;
[1241] b is 1-1000;
[1242] each L^{LD} is independently a linker moiety or a covalent bond; and each R^{LD} is independently a lipid moiety or a targeting component, wherein at least one R^{LD} is a lipid moiety.

[1243] In some embodiments, the present disclosure provides an oligonucleotide composition comprising a plurality of oligonucleotides having the structure of:

[chemical structure]

[1244] wherein:
[1245] A^{c} is an oligonucleotide chain ([H]_{b}—Ac is an oligonucleotide);
[1246] a is 1-1000;
[1247] b is 1-1000;
[1248] each L^{LD} is independently a linker moiety; and
[1249] each R^{LD} is independently a lipid moiety or a targeting component, wherein at least one R^{LD} is a lipid moiety.

[1250] In some embodiments, the present disclosure provides an oligonucleotide composition comprising a plurality of oligonucleotides having the structure of:

[chemical structure]

[1251] wherein:
[1252] A^{c} is an oligonucleotide chain ([H]_{b}—Ac is an oligonucleotide);
[1253] a is 1-1000;
[1254] b is 1-1000;
[1255] each L^{LD} is independently a covalent bond or an optionally substituted, C₁₀-C₈₀ saturated or partially unsaturated aliphatic group, wherein one or more methylene units are optionally and independently replaced by T^{LD} or an optionally substituted group selected from C₁-C₆alkylene, C₁-C₆ alkenylene, —C≡C—, a C₁-C₆ heteroaliphatic moiety, —C(R′)₂—, —Cy-, —O—, —S—, —S—S—, —N(R′)—, —C(O)—, —C(S)—, —C(NR′)—, —C(O)N(R′)—, —N(R′)C(O)N(R′)—, —N(R′)C(O)—, —N(R′)C(O)O—, —OC(O)N(R′)—, —S(O)—, —S(O)₂—, —S(O)₂N(R′)—, —N(R′)S(O)₂—, —SC(O)—, —C(O)S—, —OC(O)—, and —C(O)O—;
[1256] each R^{LD} is independently an optionally substituted, C₁₀-C₈₀ saturated or partially unsaturated aliphatic group, wherein one or more methylene units are optionally and independently replaced by an optionally substituted group selected from C₁-C₆ alkylene, C₁-C₆ alkenylene, —C≡C—, a C₁-C₆ heteroaliphatic moiety, —C(R′)₂—, —Cy-, —O—, —S—, —S—S—, —N(R′)—, —C(O)—, —C(S)—, —C(NR′)—, —C(O)N(R′)—, —N(R′)C(O)N(R′)—, —N(R′)C(O)—, —N(R′)C(O)O—, —OC(O)N(R′)—, —S(O)—, —S(O)₂—, —S(O)₂N(R′)—, —N(R′)S(O)₂—, —SC(O)—, —C(O)S—, —OC(O)—, and —C(O)O—;
[1257] T^{LD} has the structure of:

[chemical structure]

[1258] W is O, S or Se;
[1259] each of X, Y and Z is independently —O—, —S—, —N(-L-R¹)—, or L;
[1260] L is a covalent bond or an optionally substituted, linear or branched C₁-C₁₀ alkylene, wherein one or more methylene units of L are optionally and independently replaced by an optionally substituted group selected from C₁-C₆ alkylene, C₁-C₆ alkenylene, —C≡C—, a C₁-C₆ heteroaliphatic moiety, —C(R′)₂—, —Cy-, —O—, —S—, —S—S—, —N(R′)—, —C(O)—, —C(S)—, —C(NR′)—, —C(O)N(R′)—, —N(R′)C(O)N(R′)—, —N(R′)C(O)—, —N(R′)C(O)O—, —OC(O)N(R′)—, —S(O)—, —S(O)₂—, —S(O)₂N(R′)—, —N(R′)S(O)₂——SC(O)—, —C(O)S—, —OC(O)—, and —C(O)O—;
[1261] R¹ is halogen, R, or an optionally substituted C₁-C₅₀ aliphatic wherein one or more methylene units are optionally and independently replaced by an optionally substituted group selected from C₁-C₆ alkylene, C₁-C₆ alkenylene, —C≡C—, a C₁-C₆ heteroaliphatic moiety, —C(R′)₂—, —Cy-, —O—, —S—, —S—S—, —N(R′)—, —C(O)—, —C(S)—, —C(NR′)—, —C(O)N(R′)—, —N(R′)C(O)N(R′)—, —N(R′)C(O)—, —N(R′)C(O)O—, —OC(O)N(R′)—, —S(O)—, —S(O)₂—, —S(O)₂N(R′)—, —N(R′)S(O)₂——SC(O)—, —C(O)S—, —OC(O)—, and —C(O)O—
[1262] each R′ is independently —R, —C(O)R, —CO₂R, or —SO₂R, or:
   [1263] two R′ are taken together with their intervening atoms to form an optionally substituted aryl, carbocyclic, heterocyclic, or heteroaryl ring;
[1264] —Cy- is an optionally substituted bivalent ring selected from phenylene, carbocyclylene, arylene, heteroarylene, and heterocyclylene; and
[1265] each R is independently hydrogen, or an optionally substituted group selected from C₁-C₆ aliphatic, carbocyclyl, aryl, heteroaryl, and heterocyclyl.

[1266] In some embodiments, [H]a-Ac is an oligonucleotide compound of formula O—I or a salt thereof. In some embodiments, [H]_{b}—Ac is an oligonucleotide compound of formula O—I or a salt thereof. In some embodiments, [H]_{b}—Ac is an oligonucleotide comprising one or more CpG, for example, those examples described herein. In some embodiments, [H]_{b}—Ac is an oligonucleotide of any one of Tables 2-5. In some embodiments, [H]_{b}—Ac is an oligonucleotide of any one of Table 2. In some embodiments, [H]_{b}—Ac is an oligonucleotide of any one of Table 3. In some embodiments, [H]_{b}—Ac is an oligonucleotide of any one of Table 4. In some embodiments, [H]_{b}—Ac is an oligonucleotide of any one of Table 5.

[1267] In some embodiments, P in T^{LD} is p*. In some embodiments, a conjugate has the structure of [(Ac)ₐ-L^{LD}]_{b}-R^{LD}. In some embodiments, a conjugate has the structure of (Ac)ₐ-L^{LD}-R^{LD}. In some embodiments, a is 1-100. In some embodiments, a is 1-50. In some embodiments, a is 1-40. In some embodiments, a is 1-30. In some embodiments, a is 1-20. In some embodiments, a is 1-15. In some embodiments, a is 1-10. In some embodiments, a is 1-9. In some embodiments, a is 1-8. In some embodiments, a is 1-7. In some embodiments, a is 1-6. In some embodiments, a is 1-5. In some embodiments, a is 1-4. In some embodiments, a is 1-3. In some embodiments, a is 1-2. In some embodiments, a is 1. In some embodiments, a is 2. In some embodiments, a is 3. In some embodiments, a is 4. In some embodiments, a is 5. In some embodiments, a is 6. In some embodiments, a is 7. In some embodiments, a is 8. In some embodiments, a is 9. In some embodiments, a is 10. In some embodiments, a is more than 10. In some embodiments, b is 1-100. In some embodiments, b is 1-50. In some embodiments, b is 1-40. In some embodiments, b is 1-30. In some embodiments, b is 1-20. In some embodiments, b is 1-15. In some embodiments, b is 1-10. In some embodiments, b is 1-9. In some embodiments, b is 1-8. In some embodiments, b is 1-7. In some embodiments, b is 1-6. In some embodiments, b is 1-5. In some embodiments, b is 1-4. In some embodiments, b is 1-3. In some embodiments, b is 1-2. In some embodiments, b is 1. In some embodiments, b is 2. In some embodiments, b is 3. In some embodiments, b is 4. In some embodiments, b is 5. In some embodiments, b is 6. In some embodiments, b is 7. In some embodiments, b is 8. In some embodiments, b is 9. In some embodiments, b is 10. In some embodiments, a is 1 and b is 1. In some embodiments, b is more than 10. In some embodiments, a conjugate has the structure of A^{c}-L^{LD}-R^{LD}. In some embodiments, A^{c} is conjugated through one or more of its sugar, base and/or internucleotidic linkage moieties. In some embodiments, Ac is conjugated through its 5′-OH (5′-O—). In some embodiments, A^{c} is conjugated through its 3′-OH (3′-O—). In some embodiments, before conjugation, A^{c}-(H)_{b} (b is an integer of 1-1000 depending on valency of A^{c}) is an oligonucleotide as described herein, for example, one of those described in any one of the Tables. In some embodiments, L^{LD} is -L-. In some embodiments, L^{LD} comprises a phosphorothioate group. In some embodiments, L^{LD} is —C(O)NH—(CH₂)₆—OP(═O)(S—)—O—. In some embodiments, the —C(O)NH end is connected to R^{LD}, and the —O— end is connected to the oligonucleotide, e.g., through 5′- or 3′-end. In some embodiments, R^{LD} is optionally substituted C₁₀, C₁₅, C₁₆, C₁₇, C₁₈, C₁₉, C₂₀, C₂₁, C₂₂, C₂₃, C₂₄, or C₂₅ to C₂₀, C₂₁, C₂₂, C₂₃, C₂₄, C₂₅, C₂₆, C₂₇, C₂₈, C₂₉, C₃₀, C₃₅, C₄₀, C₄₅, C₅₀, C₆₀, C₇₀, or C₈₀ aliphatic. In some embodiments, R^{LD} is optionally substituted C₁₀₋₈₀ aliphatic. In some embodiments, R^{LD} is optionally substituted C₂₀₋₈₀ aliphatic. In some embodiments, R^{LD} is optionally substituted C₁₀₋₇₀ aliphatic. In some embodiments, R^{LD} is optionally substituted C₂₀₋₇₀ aliphatic. In some embodiments, R^{LD} is optionally substituted C₁₀₋₆₀ aliphatic. In some embodiments, R^{LD} is optionally substituted C₂₀₋₆₀ aliphatic. In some embodiments, R^{LD} is optionally substituted C₁₀₋₅₀ aliphatic. In some embodiments, R^{LD} is optionally substituted C₂₀₋₅₀ aliphatic. In some embodiments, R^{LD} is optionally substituted C₁₀₋₄₀ aliphatic. In some embodiments, R^{LD} is optionally substituted C₂₀₋₄₀ aliphatic. In some embodiments, R^{LD} is optionally substituted C₁₀₋₃₀ aliphatic. In some embodiments, R^{LD} is optionally substituted C₂₀₋₃₀ aliphatic. In some embodiments, R^{LD} is unsubstituted C₁₀, C₁₅, C₁₆, C₁₇, C₁₈, C₁₉, C₂₀, C₂₁, C₂₂, C₂₃, C₂₄, or C₂₅ to C₂₆, C₂₁, C₂₂, C₂₃, C₂₄, C₂₅, C₂₆, C₂₇, C₂₈, C₂₉, C₃₀, C₃₅, C₄₀, C₄₅, C₅₀, C₆₀, C₇₀, or C₈₀ aliphatic. In some embodiments, R^{LD} is unsubstituted C₁₀₋₈₀ aliphatic. In some embodiments, R^{LD} is unsubstituted C₂₀₋₈₀ aliphatic. In some embodiments, R^{LD} is unsubstituted C₁₀₋₇₀ aliphatic. In some embodiments, R^{LD} is unsubstituted C₂₀₋₇₀ aliphatic. In some embodiments, R^{LD} is unsubstituted C₁₀₋₆₀ aliphatic. In some embodiments, R^{LD} is unsubstituted C₂₀₋₆₀ aliphatic. In some embodiments, R^{LD} is unsubstituted C₁₀₋₅₀ aliphatic. In some embodiments, R^{LD} is unsubstituted C₂₀₋₅₀ aliphatic. In some embodiments, R^{LD} is unsubstituted C₁₀₋₄₀ aliphatic. In some embodiments, R^{LD} is unsubstituted C₂₀₋₄₀ aliphatic. In some embodiments, R^{LD} is unsubstituted C₁₀₋₃₀ aliphatic. In some embodiments, R^{LD} is unsubstituted C₂₀₋₃₀ aliphatic.

[1268] In some embodiments, a lipid comprises an R^{LD} group. In some embodiments, a lipid is R^{LD}—COOH. In some embodiments, a lipid is R^{LD}—OH. In some embodiments, provided oligonucleotides comprise a lipid moiety which is R^{LD}. In some embodiments, R^{LD} is R′.

[1269] In some embodiments, R^{LD} is an optionally substituted, C₁₀-C₈₀ saturated or partially unsaturated aliphatic group, wherein one or more methylene units are optionally and independently replaced by an optionally substituted group selected from C₁-C₆ alkylene, C₁-C₆ alkenylene, —C≡C—, a C₁-C₆ heteroaliphatic moiety, —C(R′)₂—, —Cy-, —O—, —S—, —S—S—, —N(R′)—, —C(O)—, —C(S)—, —C(NR′)—, —C(O)N(R′)—, —N(R′)C(O)N(R′)—, —N(R′)C(O)—, —N(R′)C(O)O—, —OC(O)N(R′)—, —S(O)—, —S(O)₂—, —S(O)₂N(R′)—, —N(R′)S(O)₂——SC(O)—, —C(O)S—, —OC(O)—, and —C(O)O—, wherein:
[1270] each R′ is independently —R, —C(O)R, —CO₂R, or —SO₂R, or:
   [1271] two R′ are taken together with their intervening atoms to form an optionally substituted aryl, carbocyclic, heterocyclic, or heteroaryl ring;
[1272] —Cy- is an optionally substituted bivalent ring selected from carbocyclylene, arylene, heteroarylene, and heterocyclylene; and
[1273] each R is independently hydrogen, or an optionally substituted group selected from C₁-C₆ aliphatic, phenyl, carbocyclyl, aryl, heteroaryl, or heterocyclyl.

[1274] In some embodiments, R^{LD} is an optionally substituted, C₁₀-C₆₀ saturated or partially unsaturated aliphatic group, wherein one or more methylene units are optionally and independently replaced by an optionally substituted group selected from C₁-C₆ alkylene, C₁-C₆ alkenylene, —C≡C—, a C₁-C₆ heteroaliphatic moiety, —C(R′)₂—, —Cy-, —O—, —S—, —S—S—, —N(R′)—, —C(O)—, —C(S)—, —C(NR′)—, —C(O)N(R′)—, —N(R′)C(O)N(R′)—, —N(R′)C(O)—, —N(R′)C(O)O—, —OC(O)N(R′)—, —S(O)—, —S(O)₂—, —S(O)₂N(R′)—, —N(R′)S(O)₂—, —SC(O)—, —C(O)S—, —OC(O)—, and —C(O)O—, wherein:
[1275] each R′ is independently —R, —C(O)R, —CO₂R, or —SO₂R, or:
   [1276] two R′ are taken together with their intervening atoms to form an optionally substituted aryl, carbocyclic, heterocyclic, or heteroaryl ring;
[1277] —Cy- is an optionally substituted bivalent ring selected from carbocyclylene, arylene, heteroarylene, and heterocyclylene; and
[1278] each R is independently hydrogen, or an optionally substituted group selected from C₁-C₆ aliphatic, phenyl, carbocyclyl, aryl, heteroaryl, or heterocyclyl.

[1279] In some embodiments, R^{LD} is an optionally substituted, C₁₀-C₄₀ saturated or partially unsaturated aliphatic group, wherein one or more methylene units are optionally and independently replaced by an optionally substituted group selected from C₁-C₆ alkylene, C₁-C₆ alkenylene, —C≡C—, a C₁-C₆ heteroaliphatic moiety, —C(R′)₂—, —Cy-, —O—, —S—, —S—S—, —N(R′)—, —C(O)—, —C(S)—, —C(NR′)—, —C(O)N(R′)—, —N(R′)C(O)N(R′)—, —N(R′)C(O)—, —N(R′)C(O)O—, —OC(O)N(R′)—, —S(O)—, —S(O)₂—, —S(O)₂N(R′)—, —N(R′)S(O)₂—, —SC(O)—, —C(O)S—, —OC(O)—, and —C(O)O—, wherein:
[1280] each R′ is independently —R, —C(O)R, —CO₂R, or —SO₂R, or:
   [1281] two R′ are taken together with their intervening atoms to form an optionally substituted aryl, carbocyclic, heterocyclic, or heteroaryl ring;
[1282] —Cy- is an optionally substituted bivalent ring selected from carbocyclylene, arylene, heteroarylene, and heterocyclylene; and
[1283] each R is independently hydrogen, or an optionally substituted group selected from C₁-C₆ aliphatic, phenyl, carbocyclyl, aryl, heteroaryl, or heterocyclyl.

[1284] In some embodiments, R^{LD} is an optionally substituted, C₁₀-C₈₀ saturated or partially unsaturated aliphatic group, wherein one or more methylene units are optionally and independently replaced by an optionally substituted group selected from C₁-C₆ alkylene, C₁-C₆ alkenylene, —C≡C—, a C₁-C₆ heteroaliphatic moiety, —C(R′)₂—, and —Cy-. In some embodiments, R^{LD} is an optionally substituted, C10-C60 saturated or partially unsaturated aliphatic group, wherein one or more methylene units are optionally and independently replaced by an optionally substituted group selected from C₁-C₆ alkylene, C₁-C₆ alkenylene, CEC, a C₁-C₆ heteroaliphatic moiety, —C(R′)₂—, and —Cy-. In some embodiments, R^{LD} is a hydrocarbon group consisting carbon and hydrogen atoms.

[1285] In some embodiments, R^{LD} is an optionally substituted, C₁₀-C₆₀ saturated or partially unsaturated aliphatic group, wherein one or more methylene units are optionally and independently replaced by an optionally substituted group selected from C₁-C₆ alkylene, C₁-C₆ alkenylene, —C≡C—, a C₁-C₆ heteroaliphatic moiety, —C(R′)₂—, and —Cy-. In some embodiments, R^{LD} is an optionally substituted, C₁₀-C₆₀ saturated or partially unsaturated aliphatic group, wherein one or more methylene units are optionally and independently replaced by an optionally substituted group selected from C₁-C₆ alkylene, C₁-C₆ alkenylene, CEC, a C₁-C₆ heteroaliphatic moiety, —C(R′)₂—, and —Cy-. In some embodiments, R^{LD} is a hydrocarbon goup consisting carbon and hydrogen atoms.

[1286] In some embodiments, R^{LD} is an optionally substituted, C₁₀-C₄₀ saturated or partially unsaturated aliphatic group, wherein one or more methylene units are optionally and independently replaced by an optionally substituted group selected from C₁-C₆ alkylene, C₁-C₆ alkenylene, —C≡C—, a C₁-C₆ heteroaliphatic moiety, —C(R′)₂—, and —Cy-. In some embodiments, R^{LD} is an optionally substituted, C₁₀-C₆₀ saturated or partially unsaturated aliphatic group, wherein one or more methylene units are optionally and independently replaced by an optionally substituted group selected from C₁-C₆ alkylene, C₁-C₆ alkenylene, —C≡C—, a C₁-C₆ heteroaliphatic moiety, —C(R′)₂—, and —Cy-. In some embodiments, R^{LD} is a hydrocarbon group consisting carbon and hydrogen atoms.

[1287] The aliphatic group of R^{LD} can be a variety of suitable length. In some embodiments, it is C₁₀-C₈₀. In some embodiments, it is C₁₀-C₇₅. In some embodiments, it is C₁₀-C₇₀. In some embodiments, it is C₁₀-C₆₅. In some embodiments, it is C₁₀-C₆₀. In some embodiments, it is C₁₀-C₅₀. In some embodiments, it is C₁₀-C₄₀. In some embodiments, it is C₁₀-C₃₅. In some embodiments, it is C₁₀-C₃₀. In some embodiments, it is C₁₀-C₂₅. In some embodiments, it is C₁₀-C₂₄. In some embodiments, it is C₁₀-C₂₃. In some embodiments, it is C₁₀-C₂₂. In some embodiments, it is C₁₀-C₂₁. In some embodiments, it is C₁₂-C₂₂. In some embodiments, it is C₁₃-C₂₂. In some embodiments, it is C₁₄-C₂₂. In some embodiments, it is C₁₅-C₂₂. In some embodiments, it is C₁₆-C₂₂. In some embodiments, it is C₁₇-C₂₂. In some embodiments, it is C₁₈-C₂₂. In some embodiments, it is C₁₀-C₂₀. In some embodiments, the lower end of the range is C₁₀, C₁₁, C₁₂, C₁₃, C₁₄, C₁₅, C₁₆, C₁₇, or C₁₈. In some embodiments, the higher end of the range is C₁₈, C₁₉, C₂₀, C₂₁, C₂₂, C₂₃, C₂₄, C₂₅, C₂₆, C₂₇, C₂₈, C₂₉, C₃₀, C₃₅, C₄₀, C₄₅, C₅₀, C₅₅, or C₆₀. In some embodiments, it is C₁₀. In some embodiments, it is C₁₁. In some embodiments, it is C₁₂. In some embodiments, it is C₁₃. In some embodiments, it is C₁₄. In some embodiments, it is C₁₅. In some embodiments, it is C₁₆. In some embodiments, it is C₁₇. In some embodiments, it is C₁₈. In some embodiments, it is C₁₉. In some embodiments, it is C₂₀. In some embodiments, it is C₂₁. In some embodiments, it is C₂₂. In some embodiments, it is C₂₃. In some embodiments, it is C₂₄. In some embodiments, it is C₂₅. In some embodiments, it is C₃₀. In some embodiments, it is C₃₅. In some embodiments, it is C₄₀. In some embodiments, it is C₄₅. In some embodiments, it is C₅₀. In some embodiments, it is C₅₅. In some embodiments, it is C₆₀.

[1288] In some embodiments, a lipid comprises no more than one R^{LD} group. In some embodiments, a lipid comprises two or more R^{LD} groups.

[1289] In some embodiments, a lipid is conjugated to a biologically active agent, optionally through a linker, as a moiety comprising an R^{LD} group. In some embodiments, a lipid is conjugated to a biologically active agent, optionally through a linker, as a moiety comprising no more than one R^{LD} group. In some embodiments, a lipid is conjugated to a biologically active agent, optionally through a linker, as an R^{LD} group. In some embodiments, a lipid is conjugated to a biologically active agent, optionally through a linker, as a moiety comprising two or more R^{LD}groups.

[1290] In some embodiments, R^{LD} is an optionally substituted, C10-C40 saturated or partially unsaturated, aliphatic chain. In some embodiments, a lipid comprises an optionally substituted C₁₀-C₄₀ saturated or partially unsaturated, aliphatic chain.

[1291] In some embodiments, R^{LD} is an optionally substituted C₁₀-C₄₀ linear, saturated or partially unsaturated, aliphatic chain. In some embodiments, a lipid comprises an optionally substituted C₁₀-C₄₀ linear, saturated or partially unsaturated, aliphatic chain.

[1292] In some embodiments, R^{LD} is a C₁₀-C₄₀ linear, saturated or partially unsaturated, aliphatic chain, optionally substituted with one or more C₁₋₄ aliphatic groups. In some embodiments, a lipid comprises a C₁₀-C₄₀ linear, saturated or partially unsaturated, aliphatic chain, optionally substituted with one or more C₁₋₄ aliphatic groups. In some embodiments, R^{LD} is a C₁₀-C₄₀ linear, saturated or partially unsaturated, aliphatic chain, optionally substituted with one or more C₁₋₂ aliphatic groups. In some embodiments, a lipid comprises a C₁₀-C₄₀ linear, saturated or partially unsaturated, aliphatic chain, optionally substituted with one or more C₁₋₂ aliphatic groups. In some embodiments, R^{LD} is a C₁₀-C₄₀ linear, saturated or partially unsaturated, aliphatic chain, optionally substituted with one or more methyl groups. In some embodiments, a lipid comprises a C₁₀-C₄₀ linear, saturated or partially unsaturated, aliphatic chain, optionally substituted with one or more methyl groups.

[1293] In some embodiments, R^{LD} is an unsubstituted C₁₀-C₄₀ linear, saturated or partially unsaturated, aliphatic chain. In some embodiments, a lipid comprises an unsubstituted C₁₀-C₄₀ linear, saturated or partially unsaturated, aliphatic chain.

[1294] In some embodiments, a lipid comprises no more than one optionally substituted C₁₀-C₄₀ linear, saturated or partially unsaturated, aliphatic chain. In some embodiments, a lipid comprises two or more optionally substituted C₁₀-C₄₀ linear, saturated or partially unsaturated, aliphatic chain.

[1295] In some embodiments, R^{LD} is an optionally substituted, C₁₀-C₆₀ saturated or partially unsaturated, aliphatic chain. In some embodiments, a lipid comprises an optionally substituted C₁₀-C₆₀ saturated or partially unsaturated, aliphatic chain.

[1296] In some embodiments, R^{LD} is an optionally substituted C₁₀-C₆₀ linear, saturated or partially unsaturated, aliphatic chain. In some embodiments, a lipid comprises an optionally substituted C₁₀-C₆₀ linear, saturated or partially unsaturated, aliphatic chain.

[1297] In some embodiments, R^{LD} is a C₁₀-C₆₀ linear, saturated or partially unsaturated, aliphatic chain, optionally substituted with one or more C₁₋₄ aliphatic groups. In some embodiments, a lipid comprises a C₁₀-C₆₀ linear, saturated or partially unsaturated, aliphatic chain, optionally substituted with one or more C₁₋₄ aliphatic groups. In some embodiments, R^{LD} is a C₁₀-C₆₀ linear, saturated or partially unsaturated, aliphatic chain, optionally substituted with one or more C₁₋₂ aliphatic groups. In some embodiments, a lipid comprises a C₁₀-C₆₀ linear, saturated or partially unsaturated, aliphatic chain, optionally substituted with one or more C₁₋₂ aliphatic groups. In some embodiments, R^{LD} is a C₁₀-C₆₀ linear, saturated or partially unsaturated, aliphatic chain, optionally substituted with one or more methyl groups. In some embodiments, a lipid comprises a C₁₀-C₆₀ linear, saturated or partially unsaturated, aliphatic chain, optionally substituted with one or more methyl groups.

[1298] In some embodiments, R^{LD} is an unsubstituted C₁₀-C₆₀ linear, saturated or partially unsaturated, aliphatic chain. In some embodiments, a lipid comprises an unsubstituted C₁₀-C₆₀ linear, saturated or partially unsaturated, aliphatic chain.

[1299] In some embodiments, a lipid comprises no more than one optionally substituted C₁₀-C₆₀ linear, saturated or partially unsaturated, aliphatic chain. In some embodiments, a lipid comprises two or more optionally substituted C₁₀-C₆₀ linear, saturated or partially unsaturated, aliphatic chain.

[1300] In some embodiments, R^{LD} is an optionally substituted, C₁₀-C₈₀ saturated or partially unsaturated, aliphatic chain. In some embodiments, a lipid comprises an optionally substituted C₁₀-C₈₀ saturated or partially unsaturated, aliphatic chain.

[1301] In some embodiments, R^{LD} is an optionally substituted C₁₀-C₈₀ linear, saturated or partially unsaturated, aliphatic chain. In some embodiments, a lipid comprises an optionally substituted C₁₀-C₈₀ linear, saturated or partially unsaturated, aliphatic chain.

[1302] In some embodiments, R^{LD} is a C₁₀-C₈₀ linear, saturated or partially unsaturated, aliphatic chain, optionally substituted with one or more C₁₋₄ aliphatic groups. In some embodiments, a lipid comprises a C₁₀-C₈₀ linear, saturated or partially unsaturated, aliphatic chain, optionally substituted with one or more C₁₋₄ aliphatic groups. In some embodiments, R^{LD} is a C₁₀-C₈₀ linear, saturated or partially unsaturated, aliphatic chain, optionally substituted with one or more C₁₋₂ aliphatic groups. In some embodiments, a lipid comprises a C₁₀-C₈₀ linear, saturated or partially unsaturated, aliphatic chain, optionally substituted with one or more C₁₋₂ aliphatic groups. In some embodiments, R^{LD} is a C₁₀-C₈₀ linear, saturated or partially unsaturated, aliphatic chain, optionally substituted with one or more methyl groups. In some embodiments, a lipid comprises a C₁₀-C₈₀ linear, saturated or partially unsaturated, aliphatic chain, optionally substituted with one or more methyl groups.

[1303] In some embodiments, R^{LD} is an unsubstituted C₁₀-C₈₀ linear, saturated or partially unsaturated, aliphatic chain. In some embodiments, a lipid comprises an unsubstituted C₁₀-C₈₀ linear, saturated or partially unsaturated, aliphatic chain.

[1304] In some embodiments, a lipid comprises no more than one optionally substituted C₁₀-C₈₀ linear, saturated or partially unsaturated, aliphatic chain. In some embodiments, a lipid comprises two or more optionally substituted C₁₀-C₈₀ linear, saturated or partially unsaturated, aliphatic chain.

[1305] In some embodiments, R^{LD} is or comprises a C₁₀ saturated linear aliphatic chain. In some embodiments, R^{LD} is or comprises a C₁₀ partially unsaturated linear aliphatic chain. In some embodiments, R^{LD} is or comprises a C₁₁ saturated linear aliphatic chain. In some embodiments, R^{LD} is or comprises a C₁₁ partially unsaturated linear aliphatic chain. In some embodiments, R^{LD} is or comprises a C₁₂ saturated linear aliphatic chain. In some embodiments, R^{LD} is or comprises a C₁₂ partially unsaturated linear aliphatic chain. In some embodiments, R^{LD} is or comprises a C₁₃ saturated linear aliphatic chain. In some embodiments, R^{LD} is or comprises a C₁₃ partially unsaturated linear aliphatic chain. In some embodiments, R^{LD} is or comprises a C₁₄ saturated linear aliphatic chain. In some embodiments, R^{LD} is or comprises a C₁₄ partially unsaturated linear aliphatic chain. In some embodiments, R^{LD} is or comprises a C₁₅ saturated linear aliphatic chain. In some embodiments, R^{LD} is or comprises a C₁₅ partially unsaturated linear aliphatic chain. In some embodiments, R^{LD} is or comprises a C₁₆ saturated linear aliphatic chain. In some embodiments, R^{LD} is or comprises a C₁₆ partially unsaturated linear aliphatic chain. In some embodiments, R^{LD} is or comprises a C₁₇ saturated linear aliphatic chain. In some embodiments, R^{LD} is or comprises a C₁₇ partially unsaturated linear aliphatic chain. In some embodiments, R^{LD} is or comprises a C₁₈ saturated linear aliphatic chain. In some embodiments, R^{LD} is or comprises a C₁₈ partially unsaturated linear aliphatic chain. In some embodiments, R^{LD} is or comprises a C₁₉ saturated linear aliphatic chain. In some embodiments, R^{LD} is or comprises a C₁₉ partially unsaturated linear aliphatic chain. In some embodiments, R^{LD} is or comprises a C₂₀ saturated linear aliphatic chain. In some embodiments, R^{LD} is or comprises a C₂₀ partially unsaturated linear aliphatic chain. In some embodiments, R^{LD} is or comprises a C₂₁ saturated linear aliphatic chain. In some embodiments, R^{LD} is or comprises a C₂₁ partially unsaturated linear aliphatic chain. In some embodiments, R^{LD} is or comprises a C₂₂ saturated linear aliphatic chain. In some embodiments, R^{LD} is or comprises a C₂₂ partially unsaturated linear aliphatic chain. In some embodiments, R^{LD} is or comprises a C₂₃ saturated linear aliphatic chain. In some embodiments, R^{LD} is or comprises a C₂₃ partially unsaturated linear aliphatic chain. In some embodiments, R^{LD} is or comprises a C₂₄ saturated linear aliphatic chain. In some embodiments, R^{LD} is or comprises a C₂₄ partially unsaturated linear aliphatic chain. In some embodiments, R^{LD} is or comprises a C₂₅ saturated linear aliphatic chain. In some embodiments, R^{LD} is or comprises a C₂₅ partially unsaturated linear aliphatic chain. In some embodiments, R^{LD} is or comprises a C₂₆ saturated linear aliphatic chain. In some embodiments, R^{LD} is or comprises a C₂₆ partially unsaturated linear aliphatic chain. In some embodiments, R^{LD} is or comprises a C₂₇ saturated linear aliphatic chain. In some embodiments, R^{LD} is or comprises a C₂₇ partially unsaturated linear aliphatic chain. In some embodiments, R^{LD} is or comprises a C₂₈ saturated linear aliphatic chain. In some embodiments, R^{LD} is or comprises a C₂₈ partially unsaturated linear aliphatic chain. In some embodiments, R^{LD} is or comprises a C₂₉ saturated linear aliphatic chain. In some embodiments, R^{LD} is or comprises a C₂₉ partially unsaturated linear aliphatic chain. In some embodiments, R^{LD} is or comprises a C₃₀ saturated linear aliphatic chain. In some embodiments, R^{LD} is or comprises a C₃₀ partially unsaturated linear aliphatic chain.

[1306] In some embodiments, a lipid has the structure of R^{LD}—OH. In some embodiments, a lipid has the structure of R^{LD}—C(O)OH. In some embodiments, R^{LD} is

[chemical structure]

Example oligonucleotides comprising such R^{D} groups are illustrated, e.g., in Table 2. In some embodiments, a lipid is lauric acid, myristic acid, palmitic acid, stearic acid, oleic acid, linoleic acid, alpha-linolenic acid, gamma-linolenic acid, docosahexaenoic acid (DHA or cis-DHA), turbinaric acid, arachidonic acid, and dilinoleyl. In some embodiments, a lipid has a structure of:

[chemical structure]

[1307] Example oligonucleotides comprising conjugation with these lipids are illustrated, e.g., in Table 2.

[1308] In some embodiments, a lipid is, comprises or consists of any of: an at least partially hydrophobic or amphiphilic molecule, a phospholipid, a triglyceride, a diglyceride, a monoglyceride, a fat-soluble vitamin, a sterol, a fat and a wax. In some embodiments, a lipid is any of: a fatty acid, glycerolipid, glycerophospholipid, sphingolipid, sterol lipid, prenol lipid, saccharolipid, polyketide, and other molecule.

[1309] In some embodiments, the present disclosure provides example data demonstrating that many of provided oligonucleotides do not mediate an immune response, as determined by a lack of agonism of hTLR9; for example, see FIG. 25. Among other things, the present disclosure demonstrates that oligonucleotides conjugated to lipids surprisingly counteracted hTLR9 agonism, for example, that mediated by control oligonucleotide ODN2006 (e.g., conjugation of lipids to oligonucleotides antagonizes hTLR9 activity mediated by ODN2006); for examples, see FIGS. 23 and 24, WV-3545 and WV-3546 (which are oligonucleotides to the target Dystrophin). Other oligonucleotides comprising lipid moieties were also tested and were shown to have greatly enhanced ability to antagonize hTLR9 activity. For example, WV-2824 and WV-2830, conjugates of Malat1-targeting WV-2735 with stearic acid (WV-2824) and turbinaric acid (WV-2830), respectively, also demonstrated greatly enhanced ability to antagonize hTLR9 activity mediated by ODN2006. Among other things, these experiments show that conjugation of lipids, such as stearic acid, turbinaric acid, etc., with oligonucleotides can greatly increase hTLR9 antagonist activity.

### Linkers

[1310] A person having ordinary skill in the art appreciates that various technologies can be utilized to conjugate lipids to biologically active agent in accordance with the present disclosure. For example, for lipids comprising carboxyl groups, such lipids can be conjugated through the carboxyl groups. In some embodiments, a lipid is conjugated to an oligonucleotide optionally through a linker moiety.

[1311] In some embodiments, a linker has the structure of -L^{LD}-. In some embodiments, L^{LD} is T^{LD} having the structure of

[chemical structure]

wherein each variable is independently as defined and described. In some embodiments, T^{LD} has the structure of formula I. In some embodiments, T^{LD} with the 5′-O— of an oligonucleotide chain form a phosphorothioate linkage (—OP(O)(S⁻)O—). In some embodiments, T^{LD} with the 5′-O— of an oligonucleotide chain form an Sp phosphorothioate linkage. In some embodiments, T^{LD} with the 5′-O— of an oligonucleotide chain form an Rp phosphorothioate linkage. In some embodiments, T^{LD} with the 5′-O— of an oligonucleotide chain form a phosphate linkage (—OP(O)(O⁻)O—). In some embodiments, T^{LD}with the 5′-O— of an oligonucleotide chain form a phosphorodithioate linkage. In some embodiments, L^{LD} is -L-T^{LD}-. In some embodiments, Y connects to -L- and —Z - is a covalent bond, so that P directly connects to a hydroxyl group of the oligonucleotide chain. In some embodiments, P connects to the 5′-end hydroxyl (5′-O—) to form a phosphate group (natural phosphate linkage) or phosphorothioate group (phosphorothioate linkage). In some embodiments, the phosphorothioate linkage is chirally controlled and can be either Rp or Sp. Unless otherwise specified, chiral centers in the linkers (e.g., P in T^{LD}) can be either stereorandom or chirally controlled, and they are not considered as part of the backbone chiral centers, e.g., for determining whether a composition is chirally controlled. In some embodiments, L^{LD} is —NH—(CH₂)₆-T^{LD}-. In some embodiments, L^{LD} is —C(O)—NH—(CH₂)₆-T^{LD}-.

[1312] In some embodiments, a linker has the structure of -L-. In some embodiments, after conjugation to oligonucleotides, a lipid forms a moiety having the structure of -L-R^{LD}wherein each of L and R^{LD} is independently as defined and described herein.

[1313] In some embodiments, -L- comprises a bivalent aliphatic chain. In some embodiments, -L- comprises a phosphate group. In some embodiments, -L- comprises a phosphorothioate group. In some embodiments, -L- has the structure of —C(O)NH—(CH₂)₆—OP(═O)(S⁻)—. In some embodiments, -L- has the structure of —C(O)NH—(CH₂)₆—OP(═O)(O⁻)—.

[1314] Lipids, optionally through linkers, can be conjugated to oligonucleotides at various suitable locations. In some embodiments, lipids are conjugated through the 5′—OH group. In some embodiments, lipids are conjugated through the 3′—OH group. In some embodiments, lipids are conjugated through one or more sugar moieties. In some embodiments, lipids are conjugated through one or more bases. In some embodiments, lipids are incorporated through one or more internucleotidic linkages. In some embodiments, an oligonucleotide may contain multiple conjugated lipids which are independently conjugated through its 5′-OH, 3′-OH, sugar moieties, base moieties and/or internucleotidic linkages.

[1315] In some embodiments, a linker is a moiety that connects two parts of a composition; as a non-limiting example, a linker physically connects a active compound to a lipid. Non-limiting examples of suitable linkers include: an uncharged linker; a charged linker; a linker comprising an alkyl; a linker comprising a phosphate; a branched linker; an unbranched linker; a linker comprising at least one cleavage group; a linker comprising at least one redox cleavage group; a linker comprising at least one phosphate-based cleavage group; a linker comprising at least one acid-cleavage group; a linker comprising at least one ester-based cleavage group; a linker comprising at least one peptide-based cleavage group.

[1316] In some embodiments, a linker comprises an uncharged linker or a charged linker.

[1317] In some embodiments, a linker comprises an alkyl.

[1318] In some embodiments, a linker comprises a phosphate. In various embodiments, a phosphate can also be modified by replacement of a bridging oxygen, (i.e. oxygen that links the phosphate to the nucleoside), with nitrogen (bridged phosphoroamidates), sulfur (bridged phosphorothioates) and carbon (bridged methylenephosphonates). The replacement can occur at the either linking oxygen or at both the linking oxygens. In some embodiments, the bridging oxygen is the 3′-oxygen of a nucleoside, replacement with carbon is done. In some embodiments, the bridging oxygen is the 5′-oxygen of a nucleoside, replacement with nitrogen is done. In various embodiments, the linker comprising a phosphate comprises any one or more of: a phosphorodithioate, phosphoramidate, boranophosphonate, or a compound of formula (I):

[chemical structure]

where R³ is selected from OH, SH, NH₂, BH₃, CH₃, C₁₋₆ alkyl, C₆₋₁₀ aryl, C₁₋₆ alkoxy and C₆₋₁₀ aryl-oxy, wherein C₁₋₆ alkyl and C₆₋₁₀ aryl are unsubstituted or optionally independently substituted with 1 to 3 groups independently selected from halo, hydroxyl and NH₂; and R⁴ is selected from O, S, NH, or CH₂.

[1319] In some embodiments, a linker comprises a direct bond or an atom such as oxygen or sulfur, a unit such as NR¹, C(O), C(O)NH, SO, SO₂, SO₂NH or a chain of atoms, such as substituted or unsubstituted alkyl, substituted or unsubstituted alkenyl, substituted or unsubstituted alkynyl, arylalkyl, arylalkenyl, arylalkynyl, heteroarylalkyl, heteroarylalkenyl, heteroarylalkynyl, heterocyclylalkyl, heterocyclylalkenyl, heterocyclylalkynyl, aryl, heteroaryl, heterocyclyl, cycloalkyl, cycloalkenyl, alkylarylalkyl, alkylarylalkenyl, alkylarylalkynyl, alkenylarylalkyl, alkenylarylalkenyl, alkenylarylalkynyl, alkynylarylalkyl, alkynylarylalkenyl, alkynylarylalkynyl, alkylheteroarylalkyl, alkylheteroarylalkenyl, alkylheteroarylalkynyl, alkenylheteroarylalkyl, alkenylheteroarylalkenyl, alkenylheteroarylalkynyl, alkynylheteroarylalkyl, alkynylheteroarylalkenyl, alkynylheteroarylalkynyl, alkylheterocyclylalkyl, alkylheterocyclylalkenyl, alkylhererocyclylalkynyl, alkenylheterocyclylalkyl, alkenylheterocyclylalkenyl, alkenylheterocyclylalkynyl, alkynylheterocyclylalkyl, alkynylheterocyclylalkenyl, alkynylheterocyclylalkynyl, alkylaryl, alkenylaryl, alkynylaryl, alkylheteroaryl, alkenylheteroaryl, alkynylhereroaryl, where one or more methylenes can be interrupted or terminated by O, S, S(O), SO₂, N(R₁)₂, C(O), cleavable linking group, substituted or unsubstituted aryl, substituted or unsubstituted heteroaryl, substituted or unsubstituted heterocyclic; where R¹ is hydrogen, acyl, aliphatic or substituted aliphatic.

[1320] In some embodiments, a linker is a branched linker. In some embodiments, a branchpoint of the branched linker may be at least trivalent, but may be a tetravalent, pentavalent or hexavalent atom, or a group presenting such multiple valencies. In some embodiments, a branchpoint is —N, —N(Q)-C, —O—C, —S—C, —SS—C, —C(O)N(Q)-C, —OC(O)N(Q)-C, —N(Q)C(O)—C, or —N(Q)C(O)O—C; wherein Q is independently for each occurrence H or optionally substituted alkyl. In other embodiment, the branchpoint is glycerol or glycerol derivative.

[1321] In one embodiment, a linker comprises at least one cleavable linking group.

[1322] As a non-limiting example, a cleavable linking group can be sufficiently stable outside the cell, but which upon entry into a target cell is cleaved to release the two parts the linker is holding together. As a non-limiting example, a cleavable linking group is cleaved at least 10 times or more, at least 100 times faster in the target cell or under a first reference condition (which can, e.g., be selected to mimic or represent intracellular conditions) than in the blood of a subject, or under a second reference condition (which can, e.g., be selected to mimic or represent conditions found in the blood or serum). Cleavable linking groups are susceptible to cleavage agents, e.g., pH, redox potential or the presence of degradative molecules. Generally, cleavage agents are more prevalent or found at higher levels or activities inside cells than in serum or blood. Examples of such degradative agents include: redox agents which are selected for particular substrates or which have no substrate specificity, including, e.g., oxidative or reductive enzymes or reductive agents such as mercaptans, present in cells, that can degrade a redox cleavable linking group by reduction; esterases; endosomes or agents that can create an acidic environment, e.g., those that result in a pH of five or lower; enzymes that can hydrolyze or degrade an acid cleavable linking group by acting as a general acid, peptidases (which can be substrate specific), and phosphatases.

[1323] As a non-limiting example, a cleavable linkage group, such as a disulfide bond can be susceptible to pH. The pH of human serum is 7.4, while the average intracellular pH is slightly lower, ranging from about 7.1-7.3. Endosomes have a more acidic pH, in the range of 5.5-6.0, and lysosomes have an even more acidic pH at around 5.0. Some linkers will have a cleavable linking group that is cleaved at a desired pH, thereby releasing the cationic lipid from the ligand inside the cell, or into the desired compartment of the cell.

[1324] As a non-limiting example, a linker can include a cleavable linking group that is cleavable by a particular enzyme. The type of cleavable linking group incorporated into a linker can depend on the cell to be targeted. For example, liver targeting ligands can be linked to the cationic lipids through a linker that includes an ester group. Liver cells are rich in esterases, and therefore the linker will be cleaved more efficiently in liver cells than in cell types that are not esterase-rich. Other cell-types rich in esterases include cells of the lung, renal cortex, and testis.

[1325] As a non-limiting example, a linker can contain a peptide bond, which can be used when targeting cell types rich in peptidases, such as liver cells and synoviocytes.

[1326] As a non-limiting example, suitability of a candidate cleavable linking group can be evaluated by testing the ability of a degradative agent (or condition) to cleave the candidate linking group. It will also be desirable to also test the candidate cleavable linking group for the ability to resist cleavage in the blood or when in contact with other non-target tissue. Thus one can determine the relative susceptibility to cleavage between a first and a second condition, where the first is selected to be indicative of cleavage in a target cell and the second is selected to be indicative of cleavage in other tissues or biological fluids, e.g., blood or serum. The evaluations can be carried out in cell free systems, in cells, in cell culture, in organ or tissue culture, or in whole animals. It may be useful to make initial evaluations in cell-free or culture conditions and to confirm by further evaluations in whole animals. As a non-limiting example, useful candidate compounds are cleaved at least 2, 4, 10 or 100 times faster in the cell (or under in vitro conditions selected to mimic intracellular conditions) as compared to blood or serum (or under in vitro conditions selected to mimic extracellular conditions).

[1327] In some embodiments, a linker comprises a redox cleavable linking group. As a non-limiting example, one class of cleavable linking groups are redox cleavable linking groups that are cleaved upon reduction or oxidation. A non-limiting example of reductively cleavable linking group is a disulphide linking group (—S—S—). To determine if a candidate cleavable linking group is a suitable “reductively cleavable linking group,” or for example is suitable for use with a particular oligonucleotide moiety and particular targeting agent one can look to methods described herein. As a non-limiting example, a candidate can be evaluated by incubation with dithiothreitol (DTT), or other reducing agent using reagents know in the art, which mimic the rate of cleavage which would be observed in a cell, e.g., a target cell. The candidates can also be evaluated under conditions which are selected to mimic blood or serum conditions. As a non-limiting example, candidate compounds are cleaved by at most 10% in the blood. As a non-limiting example, useful candidate compounds are degraded at least 2, 4, 10 or 100 times faster in the cell (or under in vitro conditions selected to mimic intracellular conditions) as compared to blood (or under in vitro conditions selected to mimic extracellular conditions). The rate of cleavage of candidate compounds can be determined using standard enzyme kinetics assays under conditions chosen to mimic intracellular media and compared to conditions chosen to mimic extracellular media.

[1328] In some embodiments, a linker comprises a phosphate-based cleavable linking groups are cleaved by agents that degrade or hydrolyze the phosphate group. An example of an agent that cleaves phosphate groups in cells are enzymes such as phosphatases in cells. Examples of phosphate-based linking groups are —O—P(O)(ORk)-O—, —O—P(S)(ORk)-O—, —O—P(S)(SRk)-O—, —S—P(O)(ORk)-O—, —O—P(O)(ORk)-S—, —S—P(O)(ORk)-S—, —O—P(S)(ORk)-S—, —S—P(S)(ORk)-O—, —O—P(O)(Rk)-O—, —O—P(S)(Rk)-O—, —S—P(O)(Rk)-O—, —S—P(S)(Rk)-O—, —S—P(O)(Rk)-S—, —O—P(S)(Rk)-S—. Additional non-limiting examples are —O—P(O)(OH)—O—, —O—P(S)(OH)—O—, —O—P(S)(SH)—O—, —S—P(O)(OH)—O—, —O—P(O)(OH)—S—, —S—P(O)(OH)—S—, —O—P(S)(OH)—S—, —S—P(S)(OH)—O—, —O—P(O)(H)—O—, —O—P(S)(H)—O—, —S—P(O)(H)—O—, —S—P(S)(H)—O—, —S—P(O)(H)—S—, —O—P(S)(H)—S—. An additional non-limiting examples is —O—P(O)(OH)—O—. In various embodiments, Rk is any of: OH, SH, NH₂, BH₃, CH₃, C₁₋₆ alkyl, C₆₋₁₀ aryl, C₁₋₆ alkoxy and C₆₋₁₀ aryl-oxy, wherein C₁₋₆ alkyl and C₆₋₁₀ aryl are unsubstituted or optionally independently substituted with 1 to 3 groups independently selected from halo, hydroxyl and NH₂; and R⁴ is selected from O, S, NH, or CH₂.

[1329] In some embodiments, a linker comprises an acid cleavable linking groups are linking groups that are cleaved under acidic conditions. As a non-limiting example, acid cleavable linking groups are cleaved in an acidic environment with a pH of about 6.5 or lower (e.g., about 6.0, 5.5, 5.0, or lower), or by agents such as enzymes that can act as a general acid. In a cell, specific low pH organelles, such as endosomes and lysosomes can provide a cleaving environment for acid cleavable linking groups. Examples of acid cleavable linking groups include but are not limited to hydrazones, esters, and esters of amino acids. Acid cleavable groups can have the general formula —C═NN—, C(O)O, or —OC(O). In an additional non-limiting example, when the carbon attached to the oxygen of the ester (the alkoxy group) is an aryl group, substituted alkyl group, or tertiary alkyl group such as dimethyl pentyl or t-butyl.

[1330] In some embodiments, a linker comprises an ester-based linking groups. As a non-limiting example, ester-based cleavable linking groups are cleaved by enzymes such as esterases and amidases in cells. Examples of ester-based cleavable linking groups include but are not limited to esters of alkylene, alkenylene and alkynylene groups. Ester cleavable linking groups have the general formula —C(O)O—, or —OC(O)—. These candidates can be evaluated using methods analogous to those described above.

[1331] In some embodiments, a linker comprises a peptide-based cleaving group. Peptide-based cleavable linking groups are cleaved by enzymes such as peptidases and proteases in cells. Peptide-based cleavable linking groups are peptide bonds formed between amino acids to yield oligopeptides (e.g., dipeptides, tripeptides etc.) and polypeptides. As a non-limiting example, peptide-based cleavable groups do not include the amide group (—C(O)NH—). The amide group can be formed between any alkylene, alkenylene or alkynylene. A peptide bond is a special type of amide bond formed between amino acids to yield peptides and proteins. As a non-limiting example, a peptide based cleavage group can be limited to the peptide bond (i.e., the amide bond) formed between amino acids yielding peptides and proteins and does not include the entire amide functional group. As a non-limiting example, a peptide-based cleavable linking groups can have the general formula —NHCHR^{A}C(O)NHCHR^{B}C(O)—, where R^{A} and R^{B} are the R groups of the two adjacent amino acids. These candidates can be evaluated using methods analogous to those described above.

[1332] Any linker reported in the art can be used, including, as non-limiting examples, those described in: U.S. Pat. App. No. 20150265708.

[1333] In some embodiments, a lipid is conjugated through a linker having the structure of -L-, wherein L is as defined and described in formula I. In some embodiments, L comprises a phosphate diester or modified phosphate diester moiety. In some embodiments, a compound formed by lipid conjugation has the structure of (R^{LD}-L-)x-(active compound), wherein x is 1 or an integer greater than 1, and each of R^{LD} and L is independently as defined and described herein. In some embodiments, x is 1. In some embodiments, x is greater than 1. In some embodiments, x is 1-50. In some embodiments, an active compound is an oligonucleotide. For example, in some embodiments, a conjugate has the following structures:

[chemical structure]

[1334] In some embodiments, a linker is selected from: an uncharged linker; a charged linker; a linker comprising an alkyl; a linker comprising a phosphate; a branched linker; an unbranched linker; a linker comprising at least one cleavage group; a linker comprising at least one redox cleavage group; a linker comprising at least one phosphate-based cleavage group; a linker comprising at least one acid-cleavage group; a linker comprising at least one ester-based cleavage group; and a linker comprising at least one peptide-based cleavage group. Other non-limiting examples of linkers are described herein, or detailed in FIG. 7. In some embodiments, a linker has the structure of -L^{LD}-. In some embodiments, a linker has the structure of -L-. In some embodiments, a linker comprises a linkage of formula I. In some embodiments, a linker is —C(O)NH—(CH₂)₆-L^{I}-, wherein L^{I} has the structure of formula I as described herein. In some embodiments, a linker is —C(O)NH—(CH₂)₆—O—P(═O)(SR¹)—O—. In some embodiments, R¹ is —H, and a linker is —C(O)NH—(CH₂)₆—O—P(═O)(SH)—O—, in some conditions, e.g., certain pH, —C(O)NH—(CH₂)₆—O—P(═O)(S⁻)—O—. In some embodiments, a linker is —C(O)NH—(CH₂)₆—O—P(═S)(SR¹)—O—. In some embodiments, R¹ is —H, and a linker is —C(O)NH—(CH₂)₆—O—P(═S)(SH)—O—, in some conditions, e.g., certain pH, —C(O)NH—(CH₂)₆—O—P(═S)(S⁻)—O—. In some embodiments, a linker is —C(O)NH—(CH₂)₆—O—P(═S)(OR¹)—O—, wherein R¹ is —CH₂CH₂CN. In some embodiments, a linker is —C(O)NH—(CH₂)₆—O—P(═S)(SR¹)—O—, wherein R¹ is —CH₂CH₂CN. In some embodiments, a provided oligonucleotide is coupled with a linker and forms a structure of H-linker-oligonucleotide. In some embodiments, a provided oligonucleotide is conjugated to a lipid and forms the structure of lipid-linker-oligonucleotide, e.g., R^{LD}-L^{LD}-oligonucleotide. In some embodiments, the —O— end of a linker is connected to an oligonucleotide. In some embodiments, the —O— end of a linker is connected to the 5′-end oligonucleotide (—O— being the oxygen in the 5′-OH).

[1335] In some embodiments, a linker comprises a PO (phosphodiester linkage), a PS (phosphorothioate linkage) or PS2 (phosphorodithioate linkage). A non-limiting example including a PS linker is shown below. In some embodiments, a linker is —O—P(O)(OH)—O-[phosphodiester], —O—P(O)(SH)—O—[phosphorothioate] or —O—P(S)(SH)—O-[phosphorodithioate]. In some embodiments, a linker comprises a C6 amino moiety (—NH—(CH₂)₆—), which is illustrated below. In some embodiments, a linker comprises a C6 amino bound to a PO, a PS, or PS2. In some embodiments, a linker is a C6 amino bound to a PO, a PS, or PS2. In some embodiments, a linker, e.g., L^{LD} or L, is —C(O)—NH—(CH₂)₆—P(O)(OH)—. In some embodiments, a linker, e.g., L^{LD} or L, is —C(O)—NH—(CH₂)₆—P(O)(OH)—, wherein —C(O)— is connected to a lipid moiety and —P(O)(OH)— is connected to an oligonucleotide chain. In some embodiments, a linker, e.g., L^{LD} or L, is —C(O)—NH—(CH₂)₆—P(O)(OH)—, wherein —C(O)— is connected to a lipid moiety and —P(O)(OH)— is connected to the 5′-O— of an oligonucleotide chain. In some embodiments, a linker, e.g., L^{LD} or L, is —C(O)—NH—(CH₂)₆—P(O)(OH)—, wherein —C(O)— is connected to a lipid moiety and —P(O)(OH)— is connected to the 3′-O— of an oligonucleotide chain. In some embodiments, a linker, e.g., L^{LD} or L, is —C(O)—NH—(CH₂)₆—P(O)(SH)—. In some embodiments, a linker, e.g., L^{LD} or L, is —C(O)—NH—(CH₂)₆—P(O)(SH)—, wherein —C(O)— is connected to a lipid moiety and —P(O)(SH)— is connected to an oligonucleotide chain. In some embodiments, a linker, e.g., L^{LD} or L, is —C(O)—NH—(CH₂)₆—P(O)(SH)—, wherein —C(O)— is connected to a lipid moiety and —P(O)(SH)— is connected to the 5′-O— of an oligonucleotide chain. In some embodiments, a linker, e.g., L^{LD} or L, is —C(O)—NH—(CH₂)₆—P(O)(SH)—, wherein —C(O)— is connected to a lipid moiety and —P(O)(SH)— is connected to the 3′-O— of an oligonucleotide chain. In some embodiments, a linker, e.g., L^{LD} or L, is —C(O)—NH—(CH₂)₆—P(S)(SH)—. In some embodiments, a linker, e.g., L^{LD} or L, is —C(O)—NH—(CH₂)₆—P(S)(SH)—, wherein —C(O)— is connected to a lipid moiety and —P(S)(SH)— is connected to an oligonucleotide chain. In some embodiments, a linker, e.g., L^{LD} or L, is —C(O)—NH—(CH₂)₆—P(S)(SH)—, wherein —C(O)— is connected to a lipid moiety and —P(S)(SH)— is connected to the 5′-O— of an oligonucleotide chain. In some embodiments, a linker, e.g., L^{LD} or L, is —C(O)—NH—(CH₂)₆—P(S)(SH)—, wherein —C(O)— is connected to a lipid moiety and —P(S)(SH)— is connected to the 3′-O— of an oligonucleotide chain. As appreciated by a person having ordinary skill in the art, at certain pH —P(O)(OH)—, —P(O)(SH)—, —P(S)(SH)— may exist as —P(O)(O⁻)—, —P(O)(S⁻)—, —P(S)(S⁻)—, respectively. In some embodiments, a lipid moiety is R^{LD}

[chemical structure]

[1336] Various chemistry and linkers can be used for conjugation in accordance with the present disclosure. For example, lipids, targeting components, etc. can be conjugated to oligonucleotides through linkers using chemistry as described below either on solid phase or in solution phase to prepare certain provided oligonucleotides, for example, those described in Table 4 (WV-2538, WV-2733, WV-2734, WV-2578 to WV-2588, WV-2807, WV-2808, WV-3022 to WV-3027, WV-3029 to WV-3038, WV-3084 to WV-3089, WV-3357 to WV-3366, WV-3517, WV-3520, WV-3543 to WV-3560, WV-3753, WV-3754, WV-3820, WV-3821, WV-3855, WV-3856, WV-3976, WV-3977, WV-3979, WV-3980, WV-4106, WV-4107, etc.):

[chemical structure]

[1337] In some embodiments, a provided composition further comprises a targeting component. A targeting component can be either conjugated or not conjugated to a lipid or a biologically active agent. In some embodiments, a targeting component is conjugated to a biologically active agent. In some embodiments, a biologically active agent is conjugated to both a lipid and a targeting component. As described in here, in some embodiments, a biologically active agent is a provided oligonucleotide. Thus, in some embodiments, a provided oligonucleotide composition further comprises, besides a lipid and oligonucleotides, a target elements. Various targeting components can be used in accordance with the present disclosure, e.g., lipids, antibodies, peptides, carbohydrates, etc. In some embodiments, provided oligonucleotides have the structure of A^{c}-[-L^{LD}-(R^{LD})ₐ]_{b}. In some embodiments, provided oligonucleotides have the structure of [(A^{c})ₐ-L^{LD}]_{b}-R^{LD}. In some embodiments, L^{LD}, R^{LD}combinations of L^{LD} and R^{LD}, or -[-L^{LD}-(R^{LD})ₐ]_{b} comprises one or more targeting components.

[1338] In some embodiments, a targeting component interacts with a protein on the surface of targeted cells. In some embodiments, such interaction facilitates internalization into targeted cells. In some embodiments, a targeting component comprises a sugar moiety. In some embodiments, a targeting component comprises a polypeptide moiety. In some embodiments, a targeting component comprises an antibody. In some embodiments, a targeting component is an antibody. In some embodiments, a targeting component comprises an inhibitor. In some embodiments, a targeting component is a moiety from a small molecule inhibitor. In some embodiments, an inhibitor is an inhibitor of a protein on the surface of targeted cells. In some embodiments, an inhibitor is a carbonic anhydrase inhibitor. In some embodiments, an inhibitor is a carbonic anhydrase inhibitor expressed on the surface of target cells. In some embodiments, a carbonic anhydrase is I, II, III, IV, V, VI, VII, VIII, IX, X, XI, XII, XIII, XIV, XV or XVI. In some embodiments, a carbonic anhydrase is membrane bound. In some embodiments, a carbonic anhydrase is IV, IX, XII or XIV. In some embodiments, an inhibitor is for IV, IX, XII and/or XIV. In some embodiments, an inhibitor is a carbonic anhydrase III inhibitor. In some embodiments, an inhibitor is a carbonic anhydrase IV inhibitor. In some embodiments, an inhibitor is a carbonic anhydrase IX inhibitor. In some embodiments, an inhibitor is a carbonic anhydrase XII inhibitor. In some embodiments, an inhibitor is a carbonic anhydrase XIV inhibitor. In some embodiments, an inhibitor comprises or is a sulfonamide (e.g., those described in Supuran, C T. Nature Rev Drug Discover 2008, 7, 168-181, which sulfonamides are incorporated herein by reference). In some embodiments, an inhibitor is a sulfonamide. In some embodiments, targeted cells are muscle cells.

[1339] In some embodiments, a targeting component is R^{LD} as defined and described in the present disclosure. In some embodiments, the present disclosure provides oligonucleotides comprising R^{LD}. In some embodiments, the present disclosure provides oligonucleotide compositions comprising oligonucleotides comprising R^{LD}. In some embodiments, the present disclosure provides oligonucleotide compositions comprising a first plurality of oligonucleotides comprising R^{LD}. In some embodiments, the present disclosure provides chirally controlled oligonucleotide compositions of oligonucleotides comprising R^{LD}. In some embodiments, R^{LD} comprises or is

[chemical structure]

In some embodiments, R^{LD} comprises or is

[chemical structure]

In some embodiments, R^{LD} comprises or is

[chemical structure]

In some embodiments, R^{LD} comprises or is

[chemical structure]

In some embodiments, R^{LD} comprises or is

[chemical structure]

In some embodiments, R^{LD} comprises or is

[chemical structure]

In some embodiments, R^{LD} comprises or is

[chemical structure]

In some embodiments, R^{LD} comprises or is

[chemical structure]

In some embodiments, R^{LD} comprises or is

[chemical structure]

In some embodiments, R^{LD} comprises or is

[chemical structure]

[1340] In some embodiments, R^{LD} comprises or is

[chemical structure]

In some embodiments, R^{LD} comprises or is

[chemical structure]

In some embodiments, R^{LD} comprises or is

[chemical structure]

In some embodiments, R^{LD} comprises or is

[chemical structure]

In some embodiments, R^{LD} comprises or is

[chemical structure]

In some embodiments, R^{LD} comprises or is

[chemical structure]

In some embodiments, R^{LD} comprises or is

[chemical structure]

In some embodiments, R^{LD} comprises or is

[chemical structure]

In some embodiments, R^{LD} comprises or is

[chemical structure]

In some embodiments, R^{LD} comprises or is

[chemical structure]

In some embodiments, R^{LD} comprises or is

[chemical structure]

In some embodiments, R^{LD} comprises or is

[chemical structure]

In some embodiments, X is O. In some embodiments, X is S.

[1341] In some embodiments, the present disclosure provides technologies (e.g., reagents, methods, etc.) for conjugating various moieties to oligonucleotide chains. In some embodiments, the present disclosure provides technologies for conjugating targeting component to oligonucleotide chains. In some embodiments, the present disclosure provides acids comprising targeting components for conjugation, e.g., R^{LD}—COOH. In some embodiments, the present disclosure provides linkers for conjugation, e.g., L^{LD}. A person having ordinary skill in the art understands that many known and widely practiced technologies can be utilized for conjugation with oligonucleotide chains in accordance with the present disclosure. In some embodiments, a provided acid is

[chemical structure]

In some embodiments, a provided acid is

[chemical structure]

In some embodiments, a provided acid is

[chemical structure]

In some embodiments, a provided acid is

[chemical structure]

In some embodiments, a provided acid is In some embodiments, a provided acid is

[chemical structure]

In some embodiments, the present disclosure provides methods and reagents for preparing such acids.

[1342] In some embodiments, provided compounds, e.g., reagents, products (e.g., oligonucleotides, amidites, etc.) etc. are at least 10%, 20%, 30%, 40%, 50%, 60%, 70%, 75%, 80%, 81%, 82%, 83%, 84%, 85%, 86%, 87%, 88%, 89%, 90%, 91%, 92%, 93%, 94%, 95%, 96%, 97%, 97% or 99% pure. In some embodiments, the purity is at least 50%. In some embodiments, the purity is at least 75%. In some embodiments, the purity is at least 80%. In some embodiments, the purity is at least 85%. In some embodiments, the purity is at least 90%. In some embodiments, the purity is at least 95%. In some embodiments, the purity is at least 96%. In some embodiments, the purity is at least 97%. In some embodiments, the purity is at least 98%. In some embodiments, the purity is at least 99%.

[1343] Target components can be incorporated into provided technologies through many types of methods in accordance with the present disclosure. In some embodiments, target components are physically mixed with provided oligonucleotides to form provided compositions. In some embodiments, target components are chemically conjugated with oligonucleotides. In some embodiments, target components are chemically conjugated with oligonucleotides through a linker, for example, L^{LD}

[1344] In some embodiments, provided compositions comprise two or more target components. In some embodiments, provided oligonucleotides comprise two or more conjugated target components. In some embodiments, the two or more conjugated target components are the same. In some embodiments, the two or more conjugated target components are different. In some embodiments, provided oligonucleotides comprise no more than one target component. In some embodiments, oligonucleotides of a provided composition comprise different types of conjugated target components. In some embodiments, oligonucleotides of a provided composition comprise the same type of target components.

[1345] Target components can be conjugated to oligonucleotides optionally through linkers. Various types of linkers in the art can be utilized in accordance of the present disclosure. In some embodiments, a linker comprise a phosphate group, which can, for example, be used for conjugating target components through chemistry similar to those employed in oligonucleotide synthesis. In some embodiments, a linker comprises an amide, ester, or ether group. In some embodiments, a linker has the structure of -L-. Target components can be conjugated through either the same or different linkers compared to lipids.

[1346] Target components, optionally through linkers, can be conjugated to oligonucleotides at various suitable locations. In some embodiments, target components are conjugated through the 5′—OH group. In some embodiments, target components are conjugated through the 3′—OH group. In some embodiments, target components are conjugated through one or more sugar moieties. In some embodiments, target components are conjugated through one or more bases. In some embodiments, target components are incorporated through one or more internucleotidic linkages. In some embodiments, an oligonucleotide may contain multiple conjugated target components which are independently conjugated through its 5′-OH, 3′-OH, sugar moieties, base moieties and/or internucleotidic linkages. Target components and lipids can be conjugated either at the same, neighboring and/or separated locations. In some embodiments, a target component is conjugated at one end of an oligonucleotide, and a lipid is conjugated at the other end.

### Nucleobases

[1347] In some embodiments, a nucleobase present in a provided CpG oligonucleotide is a natural nucleobase or a modified nucleobase derived from a natural nucleobase. Examples include, but are not limited to, uracil, thymine, adenine, cytosine, and guanine having their respective amino groups protected by acyl protecting groups, 2-fluorouracil, 2-fluorocytosine, 5-bromouracil, 5-iodouracil, 2,6-diaminopurine, azacytosine, pyrimidine analogs such as pseudoisocytosine and pseudouracil and other modified nucleobases such as 8-substituted purines, xanthine, or hypoxanthine (the latter two being the natural degradation products). Example modified nucleobases are disclosed in Chiu and Rana, R N A, 2003, 9, 1034-1048, Limbach et al. Nucleic Acids Research, 1994, 22, 2183-2196 and Revankar and Rao, Comprehensive Natural Products Chemistry, vol. 7, 313. In some embodiments, a modified nucleobase is substituted uracil, thymine, adenine, cytosine, or guanine. In some embodiments, a modified nucleobase is a functional replacement, e.g., in terms of hydrogen bonding and/or base pairing, of uracil, thymine, adenine, cytosine, or guanine. In some embodiments, a nucleobase is optionally substituted uracil, thymine, adenine, cytosine, 5-methylcytosine, or guanine. In some embodiments, a nucleobase is uracil, thymine, adenine, cytosine, 5-methylcytosine, or guanine.

[1348] In some embodiments, a modified base is optionally substituted adenine, cytosine, guanine, thymine, or uracil. In some embodiments, a modified nucleobase is independently adenine, cytosine, guanine, thymine or uracil, modified by one or more modifications by which:
[1349] (1) a nucleobase is modified by one or more optionally substituted groups independently selected from acyl, halogen, amino, azide, alkyl, alkenyl, alkynyl, aryl, heteroalkyl, heteroalkenyl, heteroalkynyl, heterocyclyl, heteroaryl, carboxyl, hydroxyl, biotin, avidin, streptavidin, substituted silyl, and combinations thereof;
[1350] (2) one or more atoms of a nucleobase are independently replaced with a different atom selected from carbon, nitrogen or sulfur;
[1351] (3) one or more double bonds in a nucleobase are independently hydrogenated; or
[1352] (4) one or more aryl or heteroaryl rings are independently inserted into a nucleobase.

[1353] Structures represented by the following general formulae are also contemplated as modified nucleobases:

[chemical structure]

wherein R⁸ is an optionally substituted, linear or branched group selected from aliphatic, aryl, aralkyl, aryloxylalkyl, carbocyclyl, heterocyclyl or heteroaryl group having 1 to 15 carbon atoms, including, by way of example only, a methyl, isopropyl, phenyl, benzyl, or phenoxymethyl group; and each of R⁹ and R¹⁰ is independently an optionally substituted group selected from linear or branched aliphatic, carbocyclyl, aryl, heterocyclyl and heteroaryl.

[1354] Modified nucleobases also include expanded-size nucleobases in which one or more aryl rings, such as phenyl rings, have been added. Nucleic base replacements described in the Glen Research catalog (www.glenresearch.com); Krueger A T et al, Acc. Chem. Res., 2007, 40, 141-150; Kool, E T, Acc. Chem. Res., 2002, 35, 936-943; Benner S. A., et al., Nat. Rev. Genet., 2005, 6, 553-543; Romesberg, F. E., et al., Curr. Opin. Chem. Biol., 2003, 7, 723-733; Hirao, I., Cuff. Opin. Chem. Biol., 2006, 10, 622-627, are contemplated as useful for the synthesis of the nucleic acids described herein. Some examples of these expanded-size nucleobases are shown below:

[chemical structure]

[1355] Herein, modified nucleobases also encompass structures that are not considered nucleobases but are other moieties such as, but not limited to, corrin- or porphyrin-derived rings. Porphyrin-derived base replacements have been described in Morales-Rojas, H and Kool, ET, Org. Lett., 2002, 4, 4377-4380. Shown below is an example of a porphyrin-derived ring which can be used as a base replacement:

[chemical structure]

[1356] In some embodiments, modified nucleobases are of any one of the following structures, optionally substituted:

[chemical structure]

[1357] In some embodiments, a modified nucleobase is fluorescent. Example such fluorescent modified nucleobases include phenanthrene, pyrene, stillbene, isoxanthine, isozanthopterin, terphenyl, terthiophene, benzoterthiophene, coumarin, lumazine, tethered stillbene, benzo-uracil, and naphtho-uracil, as shown below:

[chemical structure]

[1358] In some embodiments, a modified nucleobase is unsubstituted. In some embodiments, a modified nucleobase is substituted. In some embodiments, a modified nucleobase is substituted such that it contains, e.g., heteroatoms, alkyl groups, or linking moieties connected to fluorescent moieties, biotin or avidin moieties, or other protein or peptides. In some embodiments, a modified nucleobase is a “universal base” that is not a nucleobase in the most classical sense, but that functions similarly to a nucleobase. One representative example of such a universal base is 3-nitropyrrole.

[1359] In some embodiments, other nucleosides can also be used in the process disclosed herein and include nucleosides that incorporate modified nucleobases, or nucleobases covalently bound to modified sugars. Some examples of nucleosides or nucleotides that incorporate modified nucleobases include 4-acetylcytidine; 5-(carboxyhydroxylmethyl)uridine; 2′-O-methylcytidine; 5-carboxymethylaminomethyl-2-thiouridine; 5-carboxymethylaminomethyluridine; dihydrouridine; 2′-O-methylpseudouridine; beta,D-galactosylqueosine; 2′-O-methylguanosine; N⁶-isopentenyladenosine; 1-methyladenosine; 1-methylpseudouridine; 1-methylguanosine; 1-methylinosine; 2,2-dimethylguanosine; 2-methyladenosine; 2-methylguanosine; N⁷-methylguanosine; 3-methyl-cytidine; 5-methylcytidine; 5-hydroxymethylcytidine; 5-formylcytosine; 5-carboxylcytosine; N⁶-methyladenosine; 7-methylguanosine; 5-methylaminoethyluridine; 5-methoxyaminomethyl-2-thiouridine; beta,D-mannosylqueosine; 5-methoxycarbonylmethyluridine; 5-methoxyuridine; 2-methylthio-N⁶-isopentenyladenosine; N-((9-beta,D-ribofuranosyl-2-methylthiopurine-6-yl)carbamoyl)threonine; N-((9-beta,D-ribofuranosylpurine-6-yl)-N-methylcarbamoyl)threonine; uridine-S-oxyacetic acid methylester; uridine-S-oxyacetic acid (v); pseudouridine; queosine; 2-thiocytidine; 5-methyl-2-thiouridine; 2-thiouridine; 4-thiouridine; 5-methyluridine; 2′-O-methyl-S-methyluridine; and 2′-O-methyluridine.

[1360] In some embodiments, nucleosides include 6′-modified bicyclic nucleoside analogs that have either (R) or (S)-chirality at the 6′-position and include the analogs described in U.S. Pat. No. 7,399,845. In other embodiments, nucleosides include 5′-modified bicyclic nucleoside analogs that have either (R) or (S)-chirality at the 5′-position and include the analogs described in US Patent Application Publication No. 20070287831.

[1361] In some embodiments, a nucleobase or modified nucleobase comprises one or more biomolecule binding moieties such as e.g., antibodies, antibody fragments, biotin, avidin, streptavidin, receptor ligands, or chelating moieties. In other embodiments, a nucleobase or modified nucleobase is 5-bromouracil, 5-iodouracil, or 2,6-diaminopurine. In some embodiments, a nucleobase or modified nucleobase is modified by substitution with a fluorescent or biomolecule binding moiety. In some embodiments, the substituent on a nucleobase or modified nucleobase is a fluorescent moiety. In some embodiments, the substituent on a nucleobase or modified nucleobase is biotin or avidin.

[1362] Representative U.S. patents that teach the preparation of certain of the above noted modified nucleobases as well as other modified nucleobases include, but are not limited to, the above noted U.S. Pat. No. 3,687,808, as well as U.S. Pat. Nos. 4,845,205; 5,130,30; 5,134,066; 5,175,273; 5,367,066; 5,432,272; 5,457,187; 5,457,191; 5,459,255; 5,484,908; 5,502,177; 5,525,711; 5,552,540; 5,587,469; 5,594,121, 5,596,091; 5,614,617; 5,681,941; 5,750,692; 6,015,886; 6,147,200; 6,166,197; 6,222,025; 6,235,887; 6,380,368; 6,528,640; 6,639,062; 6,617,438; 7,045,610; 7,427,672; and 7,495,088.

[1363] In some embodiments, a base is optionally substituted A, T, C, G or U, wherein one or more —NH₂ are independently and optionally replaced with —C(-L-R′)₃, one or more —NH— are independently and optionally replaced with —C(-L-R′)₂—, one or more ═N— are independently and optionally replaced with —C(-L-R′)—, one or more ═CH— are independently and optionally replaced with ═N—, and one or more ═O are independently and optionally replaced with ═S, ═N(-L-R′), or ═C(-L-R′)₂, wherein two or more -L-R¹ are optionally taken together with their intervening atoms to form a 3-30 membered bicyclic or polycyclic ring having 0-10 heteroatom ring atoms. In some embodiments, a modified base is optionally substituted A, T, C, G or U, wherein one or more —NH₂ are independently and optionally replaced with —C(-L-R¹)₃, one or more —NH— are independently and optionally replaced with —C(-L-R′)₂—, one or more ═N— are independently and optionally replaced with —C(-L-R′)—, one or more ═CH— are independently and optionally replaced with ═N—, and one or more ═O are independently and optionally replaced with ═S, ═N(-L-R′), or ═C(-L-R′)₂, wherein two or more -L-R¹ are optionally taken together with their intervening atoms to form a 3-30 membered bicyclic or polycyclic ring having 0-10 heteroatom ring atoms, wherein the modified base is different than the natural A, T, C, G and U. In some embodiments, a base is optionally substituted A, T, C, G or U. In some embodiments, a modified base is substituted A, T, C, G or U, wherein the modified base is different than the natural A, T, C, G and U.

[1364] In some embodiments, a modified nucleotide or nucleotide analog is any modified nucleotide or nucleotide analog described in any of: Albaek et al. 2006 J. Org. Chem. 71: 7731-7740; Braasch et al., Chem. Biol., 2001, 8, 1-7; Chattopadhyaya et al. 2009 J. Org. Chem. 74: 18-134; Elayadi et al, Curr. Opinion Invens. Drugs, 2001, 2, 5561; Frieden et al. 2003 Nucl. Acids Res. 21: 6365-6372; Freier et al. 1997 Nucl. Acids Res. 25: 4429-4443; Gryaznov et al. Am. Chem. Soc. 1994, 116, 3143; Hendrix et al. 1997 Chem. Eur. J. 3: 110; Hyrup et al. 1996 Bioorg. Med. Chem. 4: 5; Jepsen et al. 2004 Oligo. 14: 130-146; Jones et al. J. Org. Chem. 1993, 58, 2983; Koizumi et al. 2003 Nuc. Acids Res. 12: 3267-3273; Koshkin et al. 1998 Tetrahedron 54: 3607-3630; Kumar et al. 1998 Bioo. Med. Chem. Let. 8: 2219-2222; Lauritsen et al. 2002 Chem. Comm. 5: 530-531; Lauritsen et al. 2003 Bioo. Med. Chem. Lett. 13: 253-256; Leumann et al. 2002 Bioorg. Med. Chem. 10: 841-854; Mesmaeker et al. Angew. Chem., Int. Ed. Engl. 1994, 33, 226; Morita et al. 2001 Nucl. Acids Res. Supp. 1: 241-242; Morita et al. 2002 Bioo. Med. Chem. Lett. 12: 73-76; Morita et al. 2003 Bioo. Med. Chem. Lett. 2211-2226; Nielsen et al. 1997 Chem. Soc. Rev. 73; Nielsen et al. 1997 J. Chem. Soc. Perkins Transl. 1: 3423-3433; Obika et al. 1997 Tetrahedron Lett. 38 (50): 8735-8; Obika et al. 1998 Tetrahedron Lett. 39: 5401-5404; Oram et al, Curr. Opinion Mol. Ther., 2001, 3, 239-243; Pallan et al. 2012 Chem. Comm. 48: 8195-8197; Petersen et al. 2003 TRENDS Biotech. 21: 74-81; Rajwanshi et al. 1999 Chem. Commun. 1395-1396; Schultz et al. 1996 Nucleic Acids Res. 24: 2966; Seth et al. 2009 J. Med. Chem. 52: 10-13; Seth et al. 2010 J. Med. Chem. 53: 8309-8318; Seth et al. 2010 J. Org. Chem. 75: 1569-1581; Seth et al. 2012 Bioo. Med. Chem. Lett. 22: 296-299; Seth et al. 2012 Mol. Ther-Nuc. Acids. 1, e47; Seth et al. From Nucleic Acids Symposium Series (2008), 52(1), 553-554; Singh et al. 1998 Chem. Comm. 1247-1248; Singh et al. 1998 J. Org. Chem. 63: 10035-39; Singh et al. 1998 J. Org. Chem. 63: 6078-6079; Singh et al. 1998 Chem. Commun. 4: 455-456; Sorensen 2003 Chem. Comm. 2130-2131; Srivastava et al. 2007 J. Am. Chem. Soc, 129: 8362-8379; Ts'o et al. Ann. N. Y. Acad. Sci. 1988, 507, 220; Van Aerschot et al. 1995 Angew. Chem. Int. Ed. Engl. 34: 1338; Vasseur et al. J. Am. Chem. Soc. 1992, 114, 4006; Wahlestedt et al. 2000 Proc. Natl. Acad. Sci. U.S.A 97: 5633-5638; U.S. Pat. Nos. 3,687,808; 4,845,205; 5,130,302; 5,134,066; 5,175,273; 5,367,066; 5,432,272; 5,457,187; 5,459,255; 5,484,908; 5,502,177; 5,525,711; 5,552,540; 5,587,469; 5,594,121; 5,596,091; 5,614,617; 5,645,985; 5,681,941; 5,750,692; 6,268,490; 6,525,191; 6,670,461; 6,770,748; 6,794,499; 7,034,133; 7,053,207; 7,399,845; and 7,427,672; U.S. Patent Publication Nos. US2004/0171570; US2005/0130923; US2007/0287831; and US2008/0039618; U.S. patent application Ser. Nos. 12/129,154; 60/989,574; 61/026,995; 61/026,998; 61/056,564; 61/086,231; 61/097,787; and 61/099,844; PCT International Applications Nos. PCT/US2008/064591; PCT/US2008/066154; and PCT/US2008/068922. WO 2004/106356; WO 1994/14226; WO 2005/021570; WO 2007/134181; WO 2007/0900071; WO 2008/154401; WO2008/101157; WO2008/150729; WO2009/006478; or WO 2016/079181.

[1365] Example nucleobases are also described in US 20110294124, US 20120316224, US 20140194610, US 20150211006, US 20150197540, WO 2015107425, PCT/US2016/043542, and PCT/US2016/043598, each of which is incorporated herein by reference

### Sugars

[1366] In some embodiments, provided CpG oligonucleotides comprise one or more modified sugar moieties.

[1367] The most common naturally occurring nucleotides are comprised of ribose sugars linked to the nucleobases adenosine (A), cytosine (C), guanine (G), and thymine (T) or uracil (U). Also contemplated are modified nucleotides wherein a phosphate group or linkage phosphorus in the nucleotides can be linked to various positions of a sugar or modified sugar. As non-limiting examples, the phosphate group or linkage phosphorus can be linked to the 2′, 3′, 4′ or 5′ hydroxyl moiety of a sugar or modified sugar. Nucleotides that incorporate modified nucleobases as described herein are also contemplated in this context. In some embodiments, nucleotides or modified nucleotides comprising an unprotected —OH moiety are used in accordance with methods of the present disclosure.

[1368] Other modified sugars can also be incorporated within a provided CpG oligonucleotide. In some embodiments, a modified sugar contains one or more substituents at the 2′ position including one of the following: —F; —CF₃, —CN, —N₃, —NO, —NO₂, —OR′, —SR′, or —N(R′)₂, wherein each R′ is independently as defined above and described herein; —O—(C₁-C₁₀ alkyl), —S—(C₁-C₁₀ alkyl), —NH—(C₁-C₁₀ alkyl), or —N(C₁-C₁₀ alkyl)₂; —O—(C₂-C₁₀ alkenyl), —S—(C₂-C₁₀ alkenyl), —NH—(C₂-C₁₀ alkenyl), or —N(C₂-C₁₀ alkenyl)₂; —O—(C₂-C₁₀ alkynyl), —S—(C₂-C₁₀ alkynyl), —NH—(C₂-C₁₀ alkynyl), or —N(C₂-C₁₀ alkynyl)₂; or O—(C₁-C₁₀ alkylene)-O—(C₁-C₁₀ alkyl), —O—(C₁-C₁₀ alkylene)-NH—(C₁-C₁₀ alkyl) or —O—(C₁-C₁₀ alkylene)-NH(C₁-C₁₀ alkyl)₂, —NH—(C₁-C₁₀ alkylene)-O—(C₁-C₁₀ alkyl), or —N(C₁-C₁₀ alkyl)-(C₁-C₁₀ alkylene)-O—(C₁-C₁₀ alkyl), wherein the alkyl, alkylene, alkenyl and alkynyl can be substituted or unsubstituted. Examples of substituents include, and are not limited to, —O(CH₂)·OCH₃, and —O(CH₂),NH₂, wherein n is from 1 to about 10, MOE, DMAOE, DMAEOE. Also contemplated herein are modified sugars described in WO 2001/088198; and Martin et al., Helv. Chim. Acta, 1995, 78, 486-504. In some embodiments, a modified sugar comprises one or more groups selected from a substituted silyl group, an RNA cleaving group, a reporter group, a fluorescent label, an intercalator, a group for improving the pharmacokinetic properties of a nucleic acid, a group for improving the pharmacodynamic properties of a nucleic acid, or other substituents having similar properties. In some embodiments, modifications are made at one or more of the 2′, 3′, 4′, 5′, or 6′ positions of the sugar or modified sugar, including the 3′ position of the sugar on the 3′-terminal nucleotide or in the 5′ position of the 5′-terminal nucleotide.

[1369] In some embodiments, a 2′-modification is 2′-OR¹. In some embodiments, a 2′-modification is 2′-R¹. In some embodiments, a 2′-modification is 2′-F.

[1370] In some embodiments, the 2′-OH of a ribose is replaced with a substituent including one of the following: —H, —F; —CF₃, —CN, —N₃, —NO, —NO₂, —OR′, —SR′, or —N(R′)₂, wherein each R′ is independently as defined above and described herein; —O—(C₁-C₁₀ alkyl), —S—(C₁-C₁₀ alkyl), —NH—(C₁-C₁₀ alkyl), or —N(C₁-C₁₀ alkyl)₂; —O—(C₂-C₁₀ alkenyl), —S—(C₂-C₁₀ alkenyl), —NH—(C₂-C₁₀ alkenyl), or —N(C₂-C₁₀ alkenyl)₂; —O—(C₂-C₁₀ alkynyl), —S—(C₂-C₁₀ alkynyl), —NH—(C₂-C₁₀ alkynyl), or —N(C₂-C₁₀ alkynyl)₂; or —O—(C₁-C₁₀ alkylene)-O—(C₁-C₁₀ alkyl), —O—(C₁-C₁₀ alkylene)-NH—(C₁-C₁₀ alkyl) or —O—(C₁-C₁₀ alkylene)-NH(C₁-C₁₀ alkyl)₂, —NH—(C₁-C₁₀ alkylene)-O—(C₁-C₁₀ alkyl), or —N(C₁-C₁₀ alkyl)-(C₁-C₁₀ alkylene)-O—(C₁-C₁₀ alkyl), wherein the alkyl, alkylene, alkenyl and alkynyl can be substituted or unsubstituted. In some embodiments, the 2′-OH is replaced with —H (deoxyribose). In some embodiments, the 2′-OH is replaced with —F. In some embodiments, the 2′-OH is replaced with —OR′. In some embodiments, the 2′-OH is replaced with —OMe. In some embodiments, the 2′-OH is replaced with —OCH₂CH₂OMe.

[1371] Modified sugars also include locked nucleic acids (LNAs). In some embodiments, two substituents on sugar carbon atoms are taken together to form a bivalent moiety. In some embodiments, two substituents are on two different sugar carbon atoms. In some embodiments, a formed bivalent moiety has the structure of -L- as defined herein. In some embodiments, -L- is —O—CH₂—, wherein —CH₂— is optionally substituted. In some embodiments, -L- is —O—CH₂—. In some embodiments, -L- is —O—CH(Et)-. In some embodiments, -L- is between C2 and C4 of a sugar moiety. In some embodiments, a locked nucleic acid has the structure indicated below. A locked nucleic acid of the structure below is indicated, wherein Ba represents a nucleobase or modified nucleobase as described herein, and wherein R^{2s} is —OCH₂C4′—.

[chemical structure]

[1372] In some embodiments, a modified sugar is an ENA such as those described in, e.g., Seth et al., J Am Chem Soc. 2010 Oct. 27; 132(42): 14942-14950. In some embodiments, a modified sugar is any of those found in an XNA (xenonucleic acid), for instance, arabinose, anhydrohexitol, threose, 2′fluoroarabinose, or cyclohexene.

[1373] Modified sugars include sugar mimetics such as cyclobutyl or cyclopentyl moieties in place of the pentofuranosyl sugar. Representative united States patents that teach the preparation of such modified sugar structures include, but are not limited to, U.S. Pat. Nos. 4,981,957; 5,118,800; 5,319,080; and 5,359,044. Some modified sugars that are contemplated include sugars in which the oxygen atom within the ribose ring is replaced by nitrogen, sulfur, selenium, or carbon. In some embodiments, a modified sugar is a modified ribose wherein the oxygen atom within the ribose ring is replaced with nitrogen, and wherein the nitrogen is optionally substituted with an alkyl group (e.g., methyl, ethyl, isopropyl, etc.).

[1374] Non-limiting examples of modified sugars include glycerol, which form glycerol nucleic acid (GNA) analogues. One example of a GNA analogue is shown below and is described in Zhang, R et al., J. Am. Chem. Soc., 2008, 130, 5846-5847; Zhang L, et al., J. Am. Chem. Soc., 2005, 127, 4174-4175 and Tsai C H et al., PNAS, 2007, 14598-14603 (X═O⁻):

[chemical structure]

[1375] Another example of a GNA derived analogue, flexible nucleic acid (FNA) based on the mixed acetal aminal of formyl glycerol, is described in Joyce G F et al., PNAS, 1987, 84, 4398-4402 and Heuberger BD and Switzer C, J. Am. Chem. Soc., 2008, 130, 412-413, and is shown below:

[chemical structure]

[1376] Additional non-limiting examples of modified sugars include hexopyranosyl (6′ to 4′), pentopyranosyl (4′ to 2′), pentopyranosyl (4′ to 3′), or tetrafuranosyl (3′ to 2′) sugars. In some embodiments, a hexopyranosyl (6′ to 4′) sugar is of any one in the following formulae:

[chemical structure]

wherein X^{s} corresponds to the P-modification group “—XLR¹” described herein and Ba is as defined herein.

[1377] In some embodiments, a pentopyranosyl (4′ to 2′) sugar is of any one in the following formulae:

[chemical structure]

wherein X^{s} corresponds to the P-modification group “—XLR¹” described herein and Ba is as defined herein.

[1378] In some embodiments, a pentopyranosyl (4′ to 3′) sugar is of any one in the following formulae:

[chemical structure]

wherein X^{s} corresponds to the P-modification group “—XLR¹” described herein and Ba is as defined herein.

[1379] In some embodiments, a tetrofuranosyl (3′ to 2′) sugar is of either in the following formulae:

[chemical structure]

wherein X^{s} corresponds to the P-modification group “—XLR¹” described herein and Ba is as defined herein.

[1380] In some embodiments, a modified sugar is of any one in the following formulae:

[chemical structure]

wherein X^{s} corresponds to the P-modification group “—XLR¹” described herein and Ba is as defined herein.

[1381] In some embodiments, one or more hydroxyl group in a sugar moiety is optionally and independently replaced with halogen, R′—N(R′)₂, —OR′, or —SR′, wherein each R′ is independently as defined above and described herein.

[1382] In some embodiments, a sugar mimetic is as illustrated below, wherein X^{s} corresponds to the P-modification group “—XLR¹” described herein, Ba is as defined herein, and X¹ is selected from —S—, —Se—, —CH₂—, —NMe-, —NEt- or —NiPr—.

[chemical structure]

[chemical structure]

[1383] In some embodiments, at least 1%, 2%, 3%, 4%, 5%, 6%, 7%, 8%, 9%, 10%, 11% 12%, 13%, 14%, 15%, 16%, 17%, 18%, 19%, 20%, 21%, 22%, 23%, 24%, 25%, 26%, 27%, 28%, 29%, 30%, 31%, 32%, 33%, 34%, 35%, 36%, 37%, 38%, 39%, 40%, 41%, 42%, 43%, 44%, 45%, 46%, 47%, 48%, 49%, 50% or more (e.g., 55%, 60%, 65%, 70%, 75%, 80%, 85%, 90%, 95% or more), inclusive, of the sugars in a chirally controlled CpG oligonucleotide composition are modified. In some embodiments, only purine residues are modified (e.g., about 1%, 2%, 3%, 4%, 5%, 6%, 7%, 8%, 9%, 10%, 11%, 12%, 13%, 14%, 15%, 16%, 17%, 18%, 19%, 20%, 21%, 22%, 23%, 24%, 25%, 26%, 27%, 28%, 29%, 30%, 31%, 32%, 33%, 34%, 35%, 36%, 37%, 38%, 39%, 40%, 41%, 42%, 43%, 44%, 45%, 46%, 47%, 48%, 49%, 50% or more [e.g., 55%, 60%, 65%, 70%, 75%, 80%, 85%, 90%, 95% or more] of the purine residues are modified). In some embodiments, only pyrimidine residues are modified (e.g., about 1%, 2%, 3%, 4%, 5%, 6%, 7%, 8%, 9%, 10%, 11%, 12%, 13%, 14%, 15%, 16%, 17%, 18%, 19%, 20%, 21%, 22%, 23%, 24%, 25%, 26%, 27%, 28%, 29%, 30%, 31%, 32%, 33%, 34%, 35%, 36%, 37%, 38%, 39%, 40%, 41%, 42%, 43%, 44%, 45%, 46%, 47%, 48%, 49%, 50% or more [e.g., 55%, 60%, 65%, 70%, 75%, 80%, 85%, 90%, 95% or more] of the pyridimin residues are modified). In some embodiments, both purine and pyrimidine residues are modified.

[1384] Modified sugars and sugar mimetics can be prepared by methods known in the art, including, but not limited to: A. Eschenmoser, Science (1999), 284:2118; M. Bohringer et al, Helv. Chim. Acta (1992), 75:1416-1477; M. Egli et al, J. Am. Chem. Soc. (2006), 128(33):10847-56; A. Eschenmoser in Chemical Synthesis: Gnosis to Prognosis, C. Chatgilialoglu and V. Sniekus, Ed., (Kluwer Academic, Netherlands, 1996), p. 293; K.-U. Schoning et al, Science (2000), 290:1347-1351; A. Eschenmoser et al, Helv. Chim. Acta (1992), 75:218; J. Hunziker et al, Helv. Chim. Acta (1993), 76:259; G. Otting et al, Helv. Chim. Acta (1993), 76:2701; K. Groebke et al, Helv. Chim. Acta (1998), 81:375; and A. Eschenmoser, Science (1999), 284:2118. Modifications to the 2′ modifications can be found in Verma, S. et al. Annu. Rev. Biochem. 1998, 67, 99-134 and all references therein. Specific modifications to the ribose can be found in the following references: 2′-fluoro (Kawasaki et. al., J. Med. Chem., 1993, 36, 831-841), 2′-MOE (Martin, P. Helv. Chim. Acta 1996, 79, 1930-1938), “LNA” (Wengel, J. Acc. Chem. Res. 1999, 32, 301-310). In some embodiments, a modified sugar is any of those described in PCT Publication No. WO2012/030683, incorporated herein by reference, and/or depicted herein. In some embodiments, a modified sugar is any modified sugar described in any of: Gryaznov, S; Chen, J.-K. J. Am. Chem. Soc. 1994, 116, 3143; Hendrix et al. 1997 Chem. Eur. J. 3: 110; Hyrup et al. 1996 Bioorg. Med. Chem. 4: 5; Jepsen et al. 2004 Oligo. 14: 130-146; Jones et al. J. Org. Chem. 1993, 58, 2983; Koizumi et al. 2003 Nuc. Acids Res. 12: 3267-3273; Koshkin et al. 1998 Tetrahedron 54: 3607-3630; Kumar et al. 1998 Bioo. Med. Chem. Let. 8: 2219-2222; Lauritsen et al. 2002 Chem. Comm. 5: 530-531; Lauritsen et al. 2003 Bioo. Med. Chem. Lett. 13: 253-256; Mesmaeker et al. Angew. Chem., Int. Ed. Engl. 1994, 33, 226; Morita et al. 2001 Nucl. Acids Res. Supp. 1: 241-242; Morita et al. 2002 Bioo. Med. Chem. Lett. 12: 73-76; Morita et al. 2003 Bioo. Med. Chem. Lett. 2211-2226; Nielsen et al. 1997 Chem. Soc. Rev. 73; Nielsen et al. 1997 J. Chem. Soc. Perkins Transl. 1: 3423-3433; Obika et al. 1997 Tetrahedron Lett. 38 (50): 8735-8; Obika et al. 1998 Tetrahedron Lett. 39: 5401-5404; Pallan et al. 2012 Chem. Comm. 48: 8195-8197; Petersen et al. 2003 TRENDS Biotech. 21: 74-81; Rajwanshi et al. 1999 Chem. Commun. 1395-1396; Schultz et al. 1996 Nucleic Acids Res. 24: 2966; Seth et al. 2009 J. Med. Chem. 52: 10-13; Seth et al. 2010 J. Med. Chem. 53: 8309-8318; Seth et al. 2010 J. Org. Chem. 75: 1569-1581; Seth et al. 2012 Bioo. Med. Chem. Lett. 22: 296-299; Seth et al. 2012 Mol. Ther-Nuc. Acids. 1, e47; Seth, Punit P; Siwkowski, Andrew; Allerson, Charles R; Vasquez, Guillermo; Lee, Sam; Prakash, Thazha P; Kinberger, Garth; Migawa, Michael T; Gaus, Hans; Bhat, Balkrishen; et al. From Nucleic Acids Symposium Series (2008), 52(1), 553-554; Singh et al. 1998 Chem. Comm. 1247-1248; Singh et al. 1998 J. Org. Chem. 63: 10035-39; Singh et al. 1998 J. Org. Chem. 63: 6078-6079; Sorensen 2003 Chem. Comm. 2130-2131; Ts'o et al. Ann. N. Y. Acad. Sci. 1988, 507, 220; Van Aerschot et al. 1995 Angew. Chem. Int. Ed. Engl. 34: 1338; Vasseur et al. J. Am. Chem. Soc. 1992, 114, 4006; WO 20070900071; WO 20070900071; or WO 2016/079181.

[1385] In some embodiments, a modified sugar moiety is an optionally substituted pentose or hexose moiety. In some embodiments, a modified sugar moiety is an optionally substituted pentose moiety. In some embodiments, a modified sugar moiety is an optionally substituted hexose moiety. In some embodiments, a modified sugar moiety is an optionally substituted ribose or hexitol moiety. In some embodiments, a modified sugar moiety is an optionally substituted ribose moiety. In some embodiments, a modified sugar moiety is an optionally substituted hexitol moiety.

[1386] In some embodiments, an example modified internucleotidic linkage and/or sugar is selected from those of:

[chemical structure]

[chemical structure]

[chemical structure]

In some embodiments, R¹ is R as defined and described. In some embodiments, R² is R. In some embodiments, R^{e} is R. In some embodiments, R^{e} is H, CH₃, Bn, COCF₃, benzoyl, benzyl, pyren-1-ylcarbonyl, pyren-1-ylmethyl, 2-aminoethyl. In some embodiments, an example modified internucleotidic linkage and/or sugar is selected from those described in Ts'o et al. Ann. N. Y. Acad. Sci. 1988, 507, 220; Gryaznov, S.; Chen, J.-K. J. Am. Chem. Soc. 1994, 116, 3143; Mesmaeker et al. Angew. Chem., Int. Ed. Engl. 1994, 33, 226; Jones et al. J. Org. Chem. 1993, 58, 2983; Vasseur et al. J. Am. Chem. Soc. 1992, 114, 4006; Van Aerschot et al. 1995 Angew. Chem. Int. Ed. Engl. 34: 1338; Hendrix et al. 1997 Chem. Eur. J. 3: 110; Koshkin et al. 1998 Tetrahedron 54: 3607-3630; Hyrup et al. 1996 Bioorg. Med. Chem. 4: 5; Nielsen et al. 1997 Chem. Soc. Rev. 73; Schultz et al. 1996 Nucleic Acids Res. 24: 2966; Obika et al. 1997 Tetrahedron Lett. 38 (50): 8735-8; Obika et al. 1998 Tetrahedron Lett. 39: 5401-5404; Singh et al. 1998 Chem. Comm. 1247-1248; Kumar et al. 1998 Bioo. Med. Chem. Let. 8: 2219-2222; Nielsen et al. 1997 J. Chem. Soc. Perkins Transl. 1: 3423-3433; Singh et al. 1998 J. Org. Chem. 63: 6078-6079; Seth et al. 2010 J. Org. Chem. 75: 1569-1581; Singh et al. 199 J. Org. Chem. 63: 10035-39; Sorensen 2003 Chem. Comm. 2130-2131; Petersen et al. 2003 TRENDS Biotech. 21: 74-81; Rajwanshi et al. 1999 Chem. Commun. 1395-1396; Jepsen et al. 2004 Oligo. 14: 130-146; Morita et al. 2001 Nucl. Acids Res. Supp. 1: 241-242; Morita et al. 2002 Bioo. Med. Chem. Lett. 12: 73-76; Morita et al. 2003 Bioo. Med. Chem. Lett. 2211-2226; Koizumi et al. 2003 Nuc. Acids Res. 12: 3267-3273; Lauritsen et al. 2002 Chem. Comm. 5: 530-531; Lauritsen et al. 2003 Bioo. Med. Chem. Lett. 13: 253-256; WO 20070900071; Seth et al., Nucleic Acids Symposium Series (2008), 52(1), 553-554; Seth et al. 2009 J. Med. Chem. 52: 10-13; Seth et al. 2012 Mol. Ther-Nuc. Acids. 1, e47; Pallan et al. 2012 Chem. Comm. 48: 8195-8197; Seth et al. 2010 J. Med. Chem. 53: 8309-8318; Seth et al. 2012 Bioo. Med. Chem. Lett. 22: 296-299; WO 2016/079181; U.S. Pat. Nos. 6,326,199; 6,066,500; and 6,440,739, the base and sugar modifications of each of which is herein incorporated by reference.

### Certain Example Oligonucleotides and Compositions

[1387] In some embodiments, the present disclosure provides oligonucleotides and compositions thereof. In some embodiments, a provided composition is a chirally controlled oligonucleotide composition. In some embodiments, a provided composition is a completely chirally controlled oligonucleotide composition, wherein each chiral internucleotidic linkage of the oligonucleotide is independently chirally controlled. Certain example oligonucleotides are provided in Table 2. In some embodiments, a provided oligonucleotide comprises one or more structural elements comprising or consisting of structural elements of any of the oligonucleotides presented in the Tables. In some embodiments, structural elements of an oligonucleotide includes any one or more of: base sequence (including length), pattern of chemical modifications to sugar and base moieties, pattern of backbone linkages (e.g., pattern of natural phosphate linkages, phosphorothioate linkages, phosphorothioate triester linkages, and combinations thereof), pattern of backbone chiral centers (e.g., pattern of stereochemistry (Rp/Sp) of chiral internucleotidic linkages), and pattern of backbone phosphorus modifications (e.g., pattern of modifications on the internucleotidic phosphorus atom, such as —S—, and -L-R¹ of formula I). In some embodiments, structural elements include lipid moieties and/or targeting components, for example, as moieties connected to sugars, bases, and/or internucleotidic linkages. In some embodiments, a structural element is base sequence. In some embodiments, a structural element is pattern of chemical modifications. In some embodiments, a structural element is pattern of sugar modifications. In some embodiments, a structural element is nucleobase modifications. In some embodiments, a structural element is pattern of lipid moieties. In some embodiments, a structural element is pattern of targeting component. In some embodiments, a structural element is a linker connecting a biologically active agent, e.g., a provided oligonucleotide, and a lipid moiety and/or a targeting component. In some embodiments, a structural element is pattern of backbone linkages. In some embodiments, a structural element is pattern of backbone chiral centers. In some embodiments, a structural element is pattern of backbone phosphorus modifications. In some embodiments, an oligonucleotide or oligonucleotide composition of any structural elemements of any oligonucleotide listed herein can be used in combination with any composition and/or method described herein, including, but not limited to, any combination with any lipid described herein, any additional component described herein, or any other composition (or component thereof) or method described herein. In some embodiments, structural elements of provided oligonucleotides comprise or consist of one or more structural elements of any oligonucleotides described herein. In some embodiments, structural elements of provided oligonucleotides comprise or consist of one or more structural elements of listed in Table 1. In some embodiments, structural elements of provided oligonucleotides comprise or consist of one or more structural elements of any oligonucleotides listed in Table 2. In some embodiments, structural elements of provided oligonucleotides comprise or consist of one or more structural elements of any oligonucleotides listed in Table 3. In some embodiments, structural elements of provided oligonucleotides comprise or consist of one or more structural elements of any oligonucleotides listed in Table 4. In some embodiments, structural elements of provided oligonucleotides comprise or consist of one or more structural elements of any oligonucleotides listed in Table 5.

TABLE 2
Example Oligonucleotides.

| WAVE | Base | SEQ ID | | SEQ ID | | | Target/ |
|---|---|---|---|---|---|---|---|
| ID | Sequence | NO: | Description | NO: | Stereochemistry¹ | Notes | Program |
| ONT-395 | UCAAGG | 10 | mU*SmC*SmA*SmA*SmG*Sm | 762 | SSSSSSSSSSSSS | Chiral version of | DMD |
| | AAGAUG | | G*SmA*SmA*SmG*SmA*SmU* | | SSSSSS | PRO051 (Drisapersen) | |
| | GCAUUU | | SmG*SmG*SmC*SmA*SmU*Sm | | | | |
| | CU | | U*SmU*SmC*SmU | | | | |
| WV-942 | UCAAGG | 11 | mU*mC*mA*mA*mG*mG*mA* | 763 | XXXXXXXXXX | PRO051 (Drisapersen) | DMD |
| | AAGAUG | | mA*mG*mA*mU*mG*mG*mC* | | XXXXXXXXX | | |
| | GCAUUU | | mA*mU*mU*mU*mC*mU | | | | |
| | CU | | | | | | |
| WV-943 | GGCCAA | 12 | mG*mG*mC*mC*mA*mA*mA* | 764 | XXXXXXXXXX | Exon 23 control | DMD |
| | ACCUCG | | mC*mC*mU*mC*mG*mG*mC* | | XXXXXXXXX | | |
| | GCUUAC | | mU*mU*mA*mC*mC*mU | | | | |
| | CU | | | | | | |
| WV-2165 | CUCCAA | 13 | mC*mU*mC*mC*mA*mA*mC* | 765 | XXXXXXXXXX | eteplirsen-all-2′-Me | DMD |
| | CAUCAA | | mA*mU*mC*mA*mA*mG*mG* | | XXXXXXXXXX | 30mer | |
| | GGAAGA | | mA*mA*mG*mA*mU*mG*mG* | | XXXXXXXXXX | | |
| | UGGCAU | | mC*mA*mU*mU*mU*mC*mU* | | | | |
| | UUCUAG | | mA*mG | | | | |
| WV-2179 | ACCAGA | 14 | mA*mC*mC*mA*mG*mA*mG* | 766 | XXXXXXXXXX | 25-mer 2′-OMethyl | DMD |
| | GUAACA | | mU*mA*mA*mC*mA*mG*mU* | | XXXXXXXXXX | | |
| | GUCUGA | | mC*mU*mG*mA*mG*mU*mA* | | XXXX | | |
| | GUAGGA | | mG*mG*mA*mG | | | | |
| | G | | | | | | |
| WV-2180 | CACCAG | 15 | mC*mA*mC*mC*mA*mG*mA* | 767 | XXXXXXXXXX | 25-mer 2′-OMethyl | DMD |
| | AGUAAC | | mG*mU*mA*mA*mC*mA*mG* | | XXXXXXXXXX | | |
| | AGUCUG | | mU*mC*mU*mG*mA*mG*mU* | | XXXX | | |
| | AGUAGG | | mA*mG*mG*mA | | | | |
| | A | | | | | | |
| WV-2181 | UCACCA | 16 | mU*mC*mA*mC*mC*mA*mG* | 768 | XXXXXXXXXX | 25-mer 2′-OMethyl | DMD |
| | GAGUAA | | mA*mG*mU*mA*mA*mC*mA* | | XXXXXXXXXX | | |
| | CAGUCU | | mG*mU*mC*mU*mG*mA*mG* | | XXXX | | |
| | GAGUAG | | mU*mA*mG*mG | | | | |
| | G | | | | | | |
| WV-2182 | GUCACC | 17 | mG*mU*mC*mA*mC*mC*mA* | 769 | XXXXXXXXXX | 25-mer 2′-OMethyl | DMD |
| | AGAGUA | | mG*mA*mG*mU*mA*mA*mC* | | XXXXXXXXXX | | |
| | ACAGUC | | mA*mG*mU*mC*mU*mG*mA* | | XXXX | | |
| | UGAGUA | | mG*mU*mA*mG | | | | |
| | G | | | | | | |
| WV-2183 | GUUGUG | 18 | mG*mU*mU*mG*mU*mG*mU* | 770 | XXXXXXXXXX | 25-mer 2′-OMethyl | DMD |
| | UCACCA | | mC*mA*mC*mC*mA*mG*mA* | | XXXXXXXXXX | | |
| | GAGUAA | | mG*mU*mA*mA*mC*mA*mG* | | XXXX | | |
| | CAGUCU | | mU*mC*mU*mG | | | | |
| | G | | | | | | |
| WV-2184 | GGUUGU | 19 | mG*mG*mU*mU*mG*mU*mG* | 771 | XXXXXXXXXX | 25-mer 2′-OMethyl | DMD |
| | GUCACC | | mU*mC*mA*mC*mC*mA*mG* | | XXXXXXXXXX | | |
| | AGAGUA | | mA*mG*mU*mA*mA*mC*mA* | | XXXX | | |
| | ACAGUC | | mG*mU*mC*mU | | | | |
| | U | | | | | | |
| WV-2185 | AGGUUG | 20 | mA*mG*mG*mU*mU*mG*mU* | 772 | XXXXXXXXXX | 25-mer 2′-OMethyl | DMD |
| | UGUCAC | | mG*mU*mC*mA*mC*mC*mA* | | XXXXXXXXXX | | |
| | CAGAGU | | mG*mA*mG*mU*mA*mA*mC* | | XXXX | | |
| | AACAGU | | mA*mG*mU*mC | | | | |
| | C | | | | | | |
| WV-2186 | CAGGUU | 21 | mC*mA*mG*mG*mU*mU*mG* | 773 | XXXXXXXXXX | 25-mer 2′-OMethyl | DMD |
| | GUGUCA | | mU*mG*mU*mC*mA*mC*mC* | | XXXXXXXXXX | | |
| | CCAGAG | | mA*mG*mA*mG*mU*mA*mA* | | XXXX | | |
| | UAACAG | | mC*mA*mG*mU | | | | |
| | U | | | | | | |
| WV-2187 | ACAGGU | 22 | mA*mC*mA*mG*mG*mU*mU* | 774 | XXXXXXXXXX | 25-mer 2′-OMethyl | DMD |
| | UGUGUC | | mG*mU*mG*mU*mC*mA*mC* | | XXXXXXXXXX | | |
| | ACCAGA | | mC*mA*mG*mA*mG*mU*mA* | | XXXX | | |
| | GUAACA | | mA*mC*mA*mG | | | | |
| | G | | | | | | |
| WV-2188 | CCACAG | 23 | mC*mC*mA*mC*mA*mG*mG* | 775 | XXXXXXXXIX | 25-mer 2′-OMethyl | DMD |
| | GUUGUG | | mU*mU*mG*mU*mG*mU*mC* | | XXXXXXXXXX | | |
| | UCACCA | | mA*mC*mC*mA*mG*mA*mG* | | XXXX | | |
| | GAGUAA | | mU*mA*mA*mC | | | | |
| | C | | | | | | |
| WV-2189 | ACCACA | 24 | mA*mC*mC*mA*mC*mA*mG* | 776 | XXXXXXXXXX | 25-mer 2′-OMethyl | DMD |
| | GGUUGU | | mG*mU*mU*mG*mU*mG*mU* | | XXXXXXXXXX | | |
| | GUCACC | | mC*mA*mC*mC*mA*mG*mA* | | XXXX | | |
| | AGAGUA | | mG*mU*mA*mA | | | | |
| | A | | | | | | |
| WV-2190 | AACCAC | 25 | mA*mA*mC*mC*mA*mC*mA* | 777 | XXXXXXXXXX | 25-mer 2′-OMethyl | DMD |
| | AGGUUG | | mG*mG*mU*mU*mG*mU*mG* | | XXXXXXXXXX | | |
| | UGUCAC | | mU*mC*mA*mC*mC*mA*mG* | | XXXX | | |
| | CAGAGU | | mA*mG*mU*mA | | | | |
| | A | | | | | | |
| WV-2191 | UAACCA | 26 | mU*mA*mA*mC*mC*mA*mC* | 778 | XXXXXXXXXX | 25-mer 2′-OMethyl | DMD |
| | CAGGUU | | mA*mG*mG*mU*mU*mG*mU* | | XXXXXXXXXX | | |
| | GUGUCA | | mG*mU*mC*mA*mC*mC*mA* | | XXXX | | |
| | CCAGAG | | mG*mA*mG*mU | | | | |
| | U | | | | | | |
| WV-2192 | GUAACC | 27 | mG*mU*mA*mA*mC*mC*mA* | 779 | XXXXXXXXXX | 25-mer 2′-OMethyl | DMD |
| | ACAGGU | | mC*mA*mG*mG*mU*mU*mG* | | XXXXXXXXXX | | |
| | UGUGUC | | mU*mG*mU*mC*mA*mC*mC* | | XXXX | | |
| | ACCAGA | | mA*mG*mA*mG | | | | |
| | G | | | | | | |
| WV-2193 | AGUAAC | 28 | mA*mG*mU*mA*mA*mC*mC* | 780 | XXXXXXXXXX | 25-mer 2′-OMethyl | DMD |
| | CACAGG | | mA*mC*mA*mG*mG*mU*mU* | | XXXXXXXXXX | | |
| | UUGUGU | | mG*mU*mG*mU*mC*mA*mC* | | XXXX | | |
| | CACCAG | | mC*mA*mG*mA | | | | |
| | A | | | | | | |
| WV-2194 | UAGUAA | 29 | mU*mA*mG*mU*mA*mA*mC* | 781 | XXXXXXXXXX | 25-mer 2′-OMethyl | DMD |
| | CCACAG | | mC*mA*mC*mA*mG*mG*mU* | | XXXXXXXXXX | | |
| | GUUGUG | | mU*mG*mU*mG*mU*mC*mA* | | XXXX | | |
| | UCACCA | | mC*mC*mA*mG | | | | |
| | G | | | | | | |
| WV-2195 | UUAGUA | 30 | mU*mU*mA*mG*mU*mA*mA* | 782 | XXXXXXXXXX | 25-mer 2′-OMethyl | DMD |
| | ACCACA | | mC*mC*mA*mC*mA*mG*mG* | | XXXXXXXXXX | | |
| | GGUUGU | | mU*mU*mG*mU*mG*mU*mC* | | XXXX | | |
| | GUCACC | | mA*mC*mC*mA | | | | |
| | A | | | | | | |
| WV-2196 | CUUAGU | 31 | mC*mU*mU*mA*mG*mU*mA* | 783 | XXXXXXXXXX | 25-mer 2′-OMethyl | DMD |
| | AACCAC | | mA*mC*mC*mA*mC*mA*mG* | | XXXXXXXXXX | | |
| | AGGUUG | | mG*mU*mU*mG*mU*mG*mU* | | XXXX | | |
| | UGUCAC | | mC*mA*mC*mC | | | | |
| | C | | | | | | |
| WV-2197 | CCUUAG | 32 | mC*mC*mU*mU*mA*mG*mU* | 784 | XXXXXXXXXX | 25-mer 2′-OMethyl | DMD |
| | UAACCA | | mA*mA*mC*mC*mA*mC*mA* | | XXXXXXXXXX | | |
| | CAGGUU | | mG*mG*mU*mU*mG*mU*mG* | | XXXX | | |
| | GUGUCA | | mU*mC*mA*mC | | | | |
| | C | | | | | | |
| WV-2198 | UCCUUA | 33 | mU*mC*mC*mU*mU*mA*mG* | 785 | XXXXXXXXXX | 25-mer 2′-OMethyl | DMD |
| | GUAACC | | mU*mA*mA*mC*mC*mA*mC* | | XXXXXXXXXX | | |
| | ACAGGU | | mA*mG*mG*mU*mU*mG*mU* | | XXXX | | |
| | UGUGUC | | mG*mU*mC*mA | | | | |
| | A | | | | | | |
| WV-2199 | GUUUCC | 34 | mG*mU*mU*mU*mC*mC*mU* | 786 | XXXXXXXXXX | 25-mer 2′-OMethyl | DMD |
| | UUAGUA | | mU*mA*mG*mU*mA*mA*mC* | | XXXXXXXXXX | | |
| | ACCACA | | mC*mA*mC*mA*mG*mG*mU* | | XXXX | | |
| | GGUUGU | | mU*mG*mU*mG | | | | |
| | G | | | | | | |
| WV-2200 | AGUUUC | 35 | mA*mG*mU*mU*mU*mC*mC* | 787 | XXXXXXXXXX | 25-mer 2′-OMethyl | DMD |
| | CUUAGU | | mU*mU*mA*mG*mU*mA*mA* | | XXXXXXXXXX | | |
| | AACCAC | | mC*mC*mA*mC*mA*mG*mG* | | XXXX | | |
| | AGGUUG | | mU*mU*mG*mU | | | | |
| | U | | | | | | |
| WV-2201 | CAGUUU | 36 | mC*mA*mG*mU*mU*mU*mC* | 788 | XXXXXXXXXX | 25-mer 2′-OMethyl | DMD |
| | CCUUAG | | mC*mU*mU*mA*mG*mU*mA* | | XXXXXXXXXX | | |
| | UAACCA | | mA*mC*mC*mA*mC*mA*mG* | | XXXX | | |
| | CAGGUU | | mG*mU*mU*mG | | | | |
| | G | | | | | | |
| WV-2202 | GCAGUU | 37 | mG*mC*mA*mG*mU*mU*mU* | 789 | XXXXXXXXXX | 25-mer 2′-OMethyl | DMD |
| | UCCUUA | | mC*mC*mU*mU*mA*mG*mU* | | XXXXXXXXXX | | |
| | GUAACC | | mA*mA*mC*mC*mA*mC*mA* | | XXXX | | |
| | ACAGGU | | mG*mG*mU*mU | | | | |
| | U | | | | | | |
| WV-2203 | GGCAGU | 38 | mG*mG*mC*mA*mG*mU*mU* | 790 | XXXXXXXXXX | 25-mer 2′-OMethyl | DMD |
| | UUCCUU | | mU*mC*mC*mU*mU*mA*mG* | | XXXXXXXXXX | | |
| | AGUAAC | | mU*mA*mA*mC*mC*mA*mC* | | XXXX | | |
| | CACAGG | | mA*mG*mG*mU | | | | |
| | U | | | | | | |
| WV-2204 | UGGCAG | 39 | mU*mG*mG*mC*mA*mG*mU* | 791 | XXXXXXXXXX | 25-mer 2′-OMethyl | DMD |
| | UUUCCU | | mU*mU*mC*mC*mU*mU*mA* | | XXXXXXXXXX | | |
| | UAGUAA | | mG*mU*mA*mA*mC*mC*mA* | | XXXX | | |
| | CCACAG | | mC*mA*mG*mG | | | | |
| | G | | | | | | |
| WV-2205 | AUGGCA | 40 | mA*mU*mG*mG*mC*mA*mG* | 792 | XXXXXXXXXX | 25-mer 2′-OMethyl | DMD |
| | GUUUCC | | mU*mU*mU*mC*mC*mU*mU* | | XXXXXXXXXX | | |
| | UUAGUA | | mA*mG*mU*mA*mA*mC*mC* | | XXXX | | |
| | ACCACA | | mA*mC*mA*mG | | | | |
| | G | | | | | | |
| WV-2206 | AGAUGG | 41 | mA*mG*mA*mU*mG*mG*mC* | 793 | XXXXXXXXXX | 25-mer 2′-OMethyl | DMD |
| | CAGUUU | | mA*mG*mU*mU*mU*mC*mC* | | XXXXXXXXXX | | |
| | CCUUAG | | mU*mU*mA*mG*mU*mA*mA* | | XXXX | | |
| | UAACCA | | mC*mC*mA*mC | | | | |
| | C | | | | | | |
| WV-2207 | GAGAUG | 42 | mG*mA*mG*mA*mU*mG*mG* | 794 | XXXXXXXXXX | 25-mer 2′-OMethyl | DMD |
| | GCAGUU | | mC*mA*mG*mU*mU*mU*mC* | | XXXXXXXXXX | | |
| | UCCUUA | | mC*mU*mU*mA*mG*mU*mA* | | XXXX | | |
| | GUAACC | | mA*mC*mC*mA | | | | |
| | A | | | | | | |
| WV-2208 | GGAGAU | 43 | mG*mG*mA*mG*mA*mU*mG* | 795 | XXXXXXXXXX | 25-mer 2′-OMethyl | DMD |
| | GGCAGU | | mG*mC*mA*mG*mU*mU*mU* | | XXXXXXXXXX | | |
| | UUCCUU | | mC*mC*mU*mU*mA*mG*mU* | | XXXX | | |
| | AGUAAC | | mA*mA*mC*mC | | | | |
| | C | | | | | | |
| WV-2209 | UGGAGA | 44 | mU*mG*mG*mA*mG*mA*mU* | 796 | XXXXXXXXXX | 25-mer 2′-OMethyl | DMD |
| | UGGCAG | | mG*mG*mC*mA*mG*mU*mU* | | XXXXXXXXXX | | |
| | UUUCCU | | mU*mC*mC*mU*mU*mA*mG* | | XXXX | | |
| | UAGUAA | | mU*mA*mA*mC | | | | |
| | C | | | | | | |
| WV-2210 | UUGGAG | 45 | mU*mU*mG*mG*mA*mG*mA* | 797 | XXXXXXXXXX | 25-mer 2′-OMethyl | DMD |
| | AUGGCA | | mU*mG*mG*mC*mA*mG*mU* | | XXXXXXXXXX | | |
| | GUUUCC | | mU*mU*mC*mC*mU*mU*mA* | | XXXX | | |
| | UUAGUA | | mG*mU*mA*mA | | | | |
| | A | | | | | | |
| WV-2211 | UUUGGA | 46 | mU*mU*mU*mG*mG*mA*mG* | 798 | XXXXXXXXXX | 25-mer 2′-OMethyl | DMD |
| | GAUGGC | | mA*mU*mG*mG*mC*mA*mG* | | XXXXXXXXXX | | |
| | AGUUUC | | mU*mU*mU*mC*mC*mU*mU* | | XXXX | | |
| | CUUAGU | | mA*mG*mU*mA | | | | |
| | A | | | | | | |
| WV-2212 | AGUUUG | 47 | mA*mG*mU*mU*mU*mG*mG* | 799 | XXXXXXXXXX | 25-mer 2′-OMethyl | DMD |
| | GAGAUG | | mA*mG*mA*mU*mG*mG*mC* | | XXXXXXXXXX | | |
| | GCAGUU | | mA*mG*mU*mU*mU*mC*mC* | | XXXX | | |
| | UCCUUA | | mU*mU*mA*mG | | | | |
| | G | | | | | | |
| WV-2213 | UAGUUU | 48 | mU*mA*mG*mU*mU*mU*mG* | 800 | XXXXXXXXXX | 25-mer 2′-OMethyl | DMD |
| | GGAGAU | | mG*mA*mG*mA*mU*mG*mG* | | XXXXXXXXXX | | |
| | GGCAGU | | mC*mA*mG*mU*mU*mU*mC* | | XXXX | | |
| | UUCCUU | | mC*mU*mU*mA | | | | |
| | A | | | | | | |
| WV-2214 | CUAGUU | 49 | mC*mU*mA*mG*mU*mU*mU* | 801 | XXXXXXXXXX | 25-mer 2′-OMethyl | DMD |
| | UGGAGA | | mG*mG*mA*mG*mA*mU*mG* | | XXXXXXXXXX | | |
| | UGGCAG | | mG*mC*mA*mG*mU*mU*mU* | | XXXX | | |
| | UUUCCU | | mC*mC*mU*mU | | | | |
| | U | | | | | | |
| WV-2215 | UCUAGU | 50 | mU*mC*mU*mA*mG*mU*mU* | 802 | XXXXXXXXXX | 25-mer 2′-OMethyl | DMD |
| | UUGGAG | | mU*mG*mG*mA*mG*mA*mU* | | XXXXXXXXXX | | |
| | AUGGCA | | mG*mG*mC*mA*mG*mU*mU* | | XXXX | | |
| | GUUUCC | | mU*mC*mC*mU | | | | |
| | U | | | | | | |
| WV-2216 | UUCUAG | 51 | mU*mU*mC*mU*mA*mG*mU* | 803 | XXXXXXXXXX | 25-mer 2′-OMethyl | DMD |
| | UUUGGA | | mU*mU*mG*mG*mA*mG*mA* | | XXXXXXXXXX | | |
| | GAUGGC | | mU*mG*mG*mC*mA*mG*mU* | | XXXX | | |
| | AGUUUC | | mU*mU*mC*mC | | | | |
| | C | | | | | | |
| WV-2217 | CAUUUC | 52 | mC*mA*mU*mU*mU*mC*mU* | 804 | XXXXXXXXXX | 25-mer 2′-OMethyl | DMD |
| | UAGUUU | | mA*mG*mU*mU*mU*mG*mG* | | XXXXXXXXXX | | |
| | GGAGAU | | mA*mG*mA*mU*mG*mG*mC* | | XXXX | | |
| | GGCAGU | | mA*mG*mU*mU | | | | |
| | U | | | | | | |
| WV-2218 | GCAUUU | 53 | mG*mC*mA*mU*mU*mU*mC* | 805 | XXXXXXXXXX | 25-mer 2′-OMethyl | DMD |
| | CUAGUU | | mU*mA*mG*mU*mU*mU*mG* | | XXXXXXXXXX | | |
| | UGGAGA | | mG*mA*mG*mA*mU*mG*mG* | | XXXX | | |
| | UGGCAG | | mC*mA*mG*mU | | | | |
| | U | | | | | | |
| WV-2219 | AUGGCA | 54 | mA*mU*mG*mG*mC*mA*mU* | 806 | XXXXXXXXXX | 25-mer 2′-OMethyl | DMD |
| | UUUCUA | | mU*mU*mC*mU*mA*mG*mU* | | XXXXXXXXXX | | |
| | GUUUGG | | mU*mU*mG*mG*mA*mG*mA* | | XXXX | | |
| | AGAUGG | | mU*mG*mG*mC | | | | |
| | C | | | | | | |
| WV-2220 | GAAGAU | 55 | mG*mA*mA*mG*mA*mU*mG* | 807 | XXXXXXXXXX | 25-mer 2′-OMethyl | DMD |
| | GGCAUU | | mG*mC*mA*mU*mU*mU*mC* | | XXXXXXXXXX | | |
| | UCUAGU | | mU*mA*mG*mU*mU*mU*mG* | | XXXX | | |
| | UUGGAG | | mG*mA*mG*mA | | | | |
| | A | | | | | | |
| WV-2221 | AGGAAG | 56 | mA*mG*mG*mA*mA*mG*mA* | 808 | XXXXXXXXXX | 25-mer 2′-OMethyl | DMD |
| | AUGGCA | | mU*mG*mG*mC*mA*mU*mU* | | XXXXXXXXXX | | |
| | UUUCUA | | mU*mC*mU*mA*mG*mU*mU* | | XXXX | | |
| | GUUUGG | | mU*mG*mG*mA | | | | |
| | A | | | | | | |
| WV-2222 | AAGGAA | 57 | mA*mA*mG*mG*mA*mA*mG* | 809 | XXXXXXXXXX | 25-mer 2′-OMethyl | DMD |
| | GAUGGC | | mA*mU*mG*mG*mC*mA*mU* | | XXXXXXXXXX | | |
| | AUUUCU | | mU*mU*mC*mU*mA*mG*mU* | | XXXX | | |
| | AGUUUG | | mU*mU*mG*mG | | | | |
| | G | | | | | | |
| WV-2223 | CAAGGA | 58 | mC*mA*mA*mG*mG*mA*mA* | 810 | XXXXXXXXXX | 25-mer 2′-OMethyl | DMD |
| | AGAUGG | | mG*mA*mU*mG*mG*mC*mA* | | XXXXXXXXXX | | |
| | CAUUUC | | mU*mU*mU*mC*mU*mA*mG* | | XXXX | | |
| | UAGUUU | | mU*mU*mU*mG | | | | |
| | G | | | | | | |
| WV-2224 | CAUCAA | 59 | mC*mA*mU*mC*mA*mA*mG* | 811 | XXXXXXXXXX | 25-mer 2′-OMethyl | DMD |
| | GGAAGA | | mG*mA*mA*mG*mA*mU*mG* | | XXXXXXXXXX | | |
| | UGGCAU | | mG*mC*mA*mU*mU*mU*mC* | | XXXX | | |
| | UUCUAG | | mU*mA*mG*mU | | | | |
| | U | | | | | | |
| WV-2225 | ACAUCA | 60 | mA*mC*mA*mU*mC*mA*mA* | 812 | XXXXXXXXXX | 25-mer 2′-OMethyl | DMD |
| | AGGAAG | | mG*mG*mA*mA*mG*mA*mU* | | XXXXXXXXXX | | |
| | AUGGCA | | mG*mG*mC*mA*mU*mU*mU* | | XXXX | | |
| | UUUCUA | | mC*mU*mA*mG | | | | |
| | G | | | | | | |
| WV-2226 | AACAUC | 61 | mA*mA*mC*mA*mU*mC*mA* | 813 | XXXXXXXXXX | 25-mer 2′-OMethyl | DMD |
| | AAGGAA | | mA*mG*mG*mA*mA*mG*mA* | | XXXXXXXXXX | | |
| | GAUGGC | | mU*mG*mG*mC*mA*mU*mU* | | XXXX | | |
| | AUUUCU | | mU*mC*mU*mA | | | | |
| | A | | | | | | |
| WV-2227 | CAACAU | 62 | mC*mA*mA*mC*mA*mU*mC* | 814 | XXXXXXXXXX | 25-mer 2′-OMethyl | DMD |
| | CAAGGA | | mA*mA*mG*mG*mA*mA*mG* | | XXXXXXXXXX | | |
| | AGAUGG | | mA*mU*mG*mG*mC*mA*mU* | | XXXX | | |
| | CAUUUC | | mU*mU*mC*mU | | | | |
| | U | | | | | | |
| WV-2228 | CUCCAA | 63 | mC*mU*mC*mC*mA*mA*mC* | 815 | XXXXXXXXXX | 25-mer 2′-OMethyl | DMD |
| | CAUCAA | | mA*mU*mC*mA*mA*mG*mG* | | XXXXXXXXXX | | |
| | GGAAGA | | mA*mA*mG*mA*mU*mG*mG* | | XXXX | | |
| | UGGCAU | | mC*mA*mU*mU | | | | |
| | U | | | | | | |
| WV-2229 | ACCUCC | 64 | mA*mC*mC*mU*mC*mC*mA* | 816 | XXXXXXXXXX | 25-mer 2′-OMethyl | DMD |
| | AACAUC | | mA*mC*mA*mU*mC*mA*mA* | | XXXXXXXXXX | | |
| | AAGGAA | | mG*mG*mA*mA*mG*mA*mU* | | XXXX | | |
| | GAUGGC | | mG*mG*mC*mA | | | | |
| | A | | | | | | |
| WV-2230 | GUACCU | 65 | mG*mU*mA*mC*mC*mU*mC* | 817 | XXXXXXXXXX | 25-mer 2′-OMethyl | DMD |
| | CCAACA | | mC*mA*mA*mC*mA*mU*mC* | | XXXXXXXXXX | | |
| | UCAAGG | | mA*mA*mG*mG*mA*mA*mG* | | XXXX | | |
| | AAGAUG | | mA*mU*mG*mG | | | | |
| | G | | | | | | |
| WV-2231 | AGGUAC | 66 | mA*mG*mG*mU*mA*mC*mC* | 818 | XXXXXXXXXX | 25-mer 2′-OMethyl | DMD |
| | CUCCAA | | mU*mC*mC*mA*mA*mC*mA* | | XXXXXXXXXX | | |
| | CAUCAA | | mU*mC*mA*mA*mG*mG*mA* | | XXXX | | |
| | GGAAGA | | mA*mG*mA*mU | | | | |
| | U | | | | | | |
| WV-2232 | AGAGCA | 67 | mA*mG*mA*mG*mC*mA*mG* | 819 | XXXXXXXXXX | 25-mer 2′-OMethyl | DMD |
| | GGUACC | | mG*mU*mA*mC*mC*mU*mC* | | XXXXXXXXXX | | |
| | UCCAAC | | mC*mA*mA*mC*mA*mU*mC* | | XXXX | | |
| | AUCAAG | | mA*mA*mG*mG | | | | |
| | G | | | | | | |
| WV-2233 | CAGAGC | 68 | mC*mA*mG*mA*mG*mC*mA* | 820 | XXXXXXXXXX | 25-mer 2′-OMethyl | DMD |
| | AGGUAC | | mG*mG*mU*mA*mC*mC*mU* | | XXXXXXXXXX | | |
| | CUCCAA | | mC*mC*mA*mA*mC*mA*mU* | | XXXX | | |
| | CAUCAA | | mC*mA*mA*mG | | | | |
| | G | | | | | | |
| WV-2234 | CUGCCA | 69 | mC*mU*mG*mC*mC*mA*mG* | 821 | XXXXXXXXXX | 25-mer 2′-OMethyl | DMD |
| | GAGCAG | | mA*mG*mC*mA*mG*mG*mU* | | XXXXXXXXXX | | |
| | GUACCU | | mA*mC*mC*mU*mC*mC*mA* | | XXXX | | |
| | CCAACA | | mA*mC*mA*mU | | | | |
| | U | | | | | | |
| WV-2235 | UCUGCC | 70 | mU*mC*mU*mG*mC*mC*mA* | 822 | XXXXXXXXXX | 25-mer 2′-OMethyl | DMD |
| | AGAGCA | | mG*mA*mG*mC*mA*mG*mG* | | XXXXXXXXXX | | |
| | GGUACC | | mU*mA*mC*mC*mU*mC*mC* | | XXXX | | |
| | UCCAAC | | mA*mA*mC*mA | | | | |
| | A | | | | | | |
| WV-2236 | AUCUGC | 71 | mA*mU*mC*mU*mG*mC*mC* | 823 | XXXXXXXXXX | 25-mer 2′-OMethyl | DMD |
| | CAGAGC | | mA*mG*mA*mG*mC*mA*mG* | | XXXXXXXXXX | | |
| | AGGUAC | | mG*mU*mA*mC*mC*mU*mC* | | XXXX | | |
| | CUCCAA | | mC*mA*mA*mC | | | | |
| | C | | | | | | |
| WV-2237 | AAUCUG | 72 | mA*mA*mU*mC*mU*mG*mC* | 824 | XXXXXXXXXX | 25-mer 2′-OMethyl | DMD |
| | CCAGAG | | mC*mA*mG*mA*mG*mC*mA* | | XXXXXXXXXX | | |
| | CAGGUA | | mG*mG*mU*mA*mC*mC*mU* | | XXXX | | |
| | CCUCCA | | mC*mC*mA*mA | | | | |
| | A | | | | | | |
| WV-2238 | AAAUCU | 73 | mA*mA*mA*mU*mC*mU*mG* | 825 | XXXXXXXXXX | 25-mer 2′-OMethyl | DMD |
| | GCCAGA | | mC*mC*mA*mG*mA*mG*mC* | | XXXXXXXXXX | | |
| | GCAGGU | | mA*mG*mG*mU*mA*mC*mC* | | XXXX | | |
| | ACCUCC | | mU*mC*mC*mA | | | | |
| | A | | | | | | |
| WV-2239 | GAAAUC | 74 | mG*mA*mA*mA*mU*mC*mU* | 826 | XXXXXXXXXX | 25-mer 2′-OMethyl | DMD |
| | UGCCAG | | mG*mC*mC*mA*mG*mA*mG* | | XXXXXXXXXX | | |
| | AGCAGG | | mC*mA*mG*mG*mU*mA*mC* | | XXXX | | |
| | UACCUC | | mC*mU*mC*mC | | | | |
| | C | | | | | | |
| WV-2240 | UGAAAU | 75 | mU*mG*mA*mA*mA*mU*mC* | 827 | XXXXXXXXXX | 25-mer 2′-OMethyl | DMD |
| | CUGCCA | | mU*mG*mC*mC*mA*mG*mA* | | XXXXXXXXXX | | |
| | GAGCAG | | mG*mC*mA*mG*mG*mU*mA* | | XXXX | | |
| | GUACCU | | mC*mC*mU*mC | | | | |
| | C | | | | | | |
| WV-2241 | UUGAAA | 76 | mU*mU*mG*mA*mA*mA*mU* | 828 | XXXXXXXXXX | 25-mer 2′-OMethyl | DMD |
| | UCUGCC | | mC*mU*mG*mC*mC*mA*mG* | | XXXXXXXXXX | | |
| | AGAGCA | | mA*mG*mC*mA*mG*mG*mU* | | XXXX | | |
| | GGUACC | | mA*mC*mC*mU | | | | |
| | U | | | | | | |
| WV-2242 | CCCGGU | 77 | mC*mC*mC*mG*mG*mU*mU* | 829 | XXXXXXXXXX | 25-mer 2′-OMethyl | DMD |
| | UGAAAU | | mG*mA*mA*mA*mU*mC*mU* | | XXXXXXXXXX | | |
| | CUGCCA | | mG*mC*mC*mA*mG*mA*mG* | | XXXX | | |
| | GAGCAG | | mC*mA*mG*mG | | | | |
| | G | | | | | | |
| WV-2243 | CCAAGC | 78 | mC*mC*mA*mA*mG*mC*mC* | 830 | XXXXXXXXXX | 25-mer 2′-OMethyl | DMD |
| | CCGGUU | | mC*mG*mG*mU*mU*mG*mA* | | XXXXXXXXXX | | |
| | GAAAUC | | mA*mA*mU*mC*mU*mG*mC* | | XXXX | | |
| | UGCCAG | | mC*mA*mG*mA | | | | |
| | A | | | | | | |
| WV-2244 | UCCAAG | 79 | mU*mC*mC*mA*mA*mG*mC* | 831 | XXXXXXXXXX | 25-mer 2′-OMethyl | DMD |
| | CCCGGU | | mC*mC*mG*mG*mU*mU*mG* | | XXXXXXXXXX | | |
| | UGAAAU | | mA*mA*mA*mU*mC*mU*mG* | | XXXX | | |
| | CUGCCA | | mC*mC*mA*mG | | | | |
| | G | | | | | | |
| WV-2245 | GUCCAA | 80 | mG*mU*mC*mC*mA*mA*mG* | 832 | XXXXXXXXXX | 25-mer 2′-OMethyl | DMD |
| | GCCCGG | | mC*mC*mC*mG*mG*mU*mU* | | XXXXXXXXXX | | |
| | UUGAAA | | mG*mA*mA*mA*mU*mC*mU* | | XXXX | | |
| | UCUGCC | | mG*mC*mC*mA | | | | |
| | A | | | | | | |
| WV-2246 | UCUGUC | 81 | mU*mC*mU*mG*mU*mC*mC* | 833 | XXXXXXXXXX | 25-mer 2′-OMethyl | DMD |
| | CAAGCC | | mA*mA*mG*mC*mC*mC*mG* | | XXXXXXXXXX | | |
| | CGGUUG | | mG*mU*mU*mG*mA*mA*mA* | | XXXX | | |
| | AAAUCU | | mU*mC*mU*mG | | | | |
| | G | | | | | | |
| WV-2247 | UUCUGU | 82 | mU*mU*mC*mU*mG*mU*mC* | 834 | XXXXXXXXXX | 25-mer 2′-OMethyl | DMD |
| | CCAAGC | | mC*mA*mA*mG*mC*mC*mC* | | XXXXXXX | | |
| | CCGGUU | | mG*mG*mU*mU*mG*mA*mA* | | XXXX | | |
| | GAAAUC | | mA*mU*mC*mU | | | | |
| | U | | | | | | |
| WV-2248 | GUUCUG | 83 | mG*mU*mU*mC*mU*mG*mU* | 835 | XXXXXXXXXX | 25-mer 2′-OMethyl | DMD |
| | UCCAAG | | mC*mC*mA*mA*mG*mC*mC* | | XXXXXXXXXX | | |
| | CCCGGU | | mC*mG*mG*mU*mU*mG*mA* | | XXXX | | |
| | UGAAAU | | mA*mA*mU*mC | | | | |
| | C | | | | | | |
| WV-2249 | AGUUCU | 84 | mA*mG*mU*mU*mC*mU*mG* | 836 | XXXXXXXXXX | 25-mer 2′-OMethyl | DMD |
| | GUCCAA | | mU*mC*mC*mA*mA*mG*mC* | | XXXXXXXXXX | | |
| | GCCCGG | | mC*mC*mG*mG*mU*mU*mG* | | XXXX | | |
| | UUGAAA | | mA*mA*mA*mU | | | | |
| | U | | | | | | |
| WV-2250 | AAGUUC | 85 | mA*mA*mG*mU*mU*mC*mU* | 837 | XXXXXXXXXX | 25-mer 2′-OMethyl | DMD |
| | UGUCCA | | mG*mU*mC*mC*mA*mA*mG* | | XXXXXXXXXX | | |
| | AGCCCG | | mC*mC*mC*mG*mG*mU*mU* | | XXXX | | |
| | GUUGAA | | mG*mA*mA*mA | | | | |
| | A | | | | | | |
| WV-2251 | UAAGUU | 86 | mU*mA*mA*mG*mU*mU*mC* | 838 | XXXXXXXXXX | 25-mer 2′-OMethyl | DMD |
| | CUGUCC | | mU*mG*mU*mC*mC*mA*mA* | | XXXXXXXXXX | | |
| | AAGCCC | | mG*mC*mC*mC*mG*mG*mU* | | XXXX | | |
| | GGUUGA | | mU*mG*mA*mA | | | | |
| | A | | | | | | |
| WV-2252 | GUAAGU | 87 | mG*mU*mA*mA*mG*mU*mU* | 839 | XXXXXXXXXX | 25-mer 2′-OMethyl | DMD |
| | UCUGUC | | mC*mU*mG*mU*mC*mC*mA* | | XXXXXXXXXX | | |
| | CAAGCC | | mA*mG*mC*mC*mC*mG*mG* | | XXXX | | |
| | CGGUUG | | mU*mU*mG*mA | | | | |
| | A | | | | | | |
| WV-2253 | GGUAAG | 88 | mG*mG*mU*mA*mA*mG*mU* | 840 | XXXXXXXXXX | 25-mer 2′-OMethyl | DMD |
| | UUCUGU | | mU*mC*mU*mG*mU*mC*mC* | | XXXXXXXXXX | | |
| | CCAAGC | | mA*mA*mG*mC*mC*mC*mG* | | XXXX | | |
| | CCGGUU | | mG*mU*mU*mG | | | | |
| | G | | | | | | |
| WV-2254 | CGGUAA | 89 | mC*mG*mG*mU*mA*mA*mG* | 841 | XXXXXXXXXX | 25-mer 2′-OMethyl | DMD |
| | GUUCUG | | mU*mU*mC*mU*mG*mU*mC* | | XXXXXXXXXX | | |
| | UCCAAG | | mC*mA*mA*mG*mC*mC*mC* | | XXXX | | |
| | CCCGGU | | mG*mG*mU*mU | | | | |
| | U | | | | | | |
| WV-2255 | UCGGUA | 90 | mU*mC*mG*mG*mU*mA*mA* | 842 | XXXXXXXXXX | 25-mer 2′-OMethyl | DMD |
| | AGUUCU | | mG*mU*mU*mC*mU*mG*mU* | | XXXXXXXXXX | | |
| | GUCCAA | | mC*mC*mA*mA*mG*mC*mC* | | XXXX | | |
| | GCCCGG | | mC*mG*mG*mU | | | | |
| | U | | | | | | |
| WV-2256 | GUCGGU | 91 | mG*mU*mC*mG*mG*mU*mA* | 843 | XXXXXXXXXX | 25-mer 2′-OMethyl | DMD |
| | AAGUUC | | mA*mG*mU*mU*mC*mU*mG* | | XXXXXXXXXX | | |
| | UGUCCA | | mU*mC*mC*mA*mA*mG*mC* | | XXXX | | |
| | AGCCCG | | mC*mC*mG*mG | | | | |
| | G | | | | | | |
| WV-2257 | AGUCGG | 92 | mA*mG*mU*mC*mG*mG*mU* | 844 | XXXXXXXXXX | 25-mer 2′-OMethyl | DMD |
| | UAAGUU | | mA*mA*mG*mU*mU*mC*mU* | | XXXXXXXXXX | | |
| | CUGUCC | | mG*mU*mC*mC*mA*mA*mG* | | XXXX | | |
| | AAGCCC | | mC*mC*mC*mG | | | | |
| | G | | | | | | |
| WV-2258 | CAGUCG | 93 | mC*mA*mG*mU*mC*mG*mG* | 845 | XXXXXXXXXX | 25-mer 2′-OMethyl | DMD |
| | GUAAGU | | mU*mA*mA*mG*mU*mU*mC* | | XXXXXXXXXX | | |
| | UCUGUC | | mU*mG*mU*mC*mC*mA*mA* | | XXXX | | |
| | CAAGCC | | mG*mC*mC*mC | | | | |
| | C | | | | | | |
| WV-2259 | AAAGCC | 94 | mA*mA*mA*mG*mC*mC*mA* | 846 | XXXXXXXXXX | 25-mer 2′-OMethyl | DMD |
| | AGUCGG | | mG*mU*mC*mG*mG*mU*mA* | | XXXXXXXXXX | | |
| | UAAGUU | | mA*mG*mU*mU*mC*mU*mG* | | XXXX | | |
| | CUGUCC | | mU*mC*mC*mA | | | | |
| | A | | | | | | |
| WV-2260 | GAAAGC | 95 | mG*mA*mA*mA*mG*mC*mC* | 847 | XXXXXXXXXX | 25-mer 2′-OMethyl | DMD |
| | CAGUCG | | mA*mG*mU*mC*mG*mG*mU* | | XXXXXXXXXX | | |
| | GUAAGU | | mA*mA*mG*mU*mU*mC*mU* | | XXXX | | |
| | UCUGUC | | mG*mU*mC*mC | | | | |
| | C | | | | | | |
| WV-2261 | GUCACC | 96 | mG*mU*mC*mA*mC*mC*mC* | 848 | XXXXXXXXXX | 25-mer 2′-OMethyl | DMD |
| | CACCAU | | mA*mC*mC*mA*mU*mC*mA* | | XXXXXXXXXX | | |
| | CACCCU | | mC*mC*mC*mU*mC*mU*mG* | | XXXX | | |
| | CUGUGA | | mU*mG*mA*mU | | | | |
| | U | | | | | | |
| WV-2262 | GGUCAC | 97 | mG*mG*mU*mC*mA*mC*mC* | 849 | XXXXXXXXXX | 25-mer 2′-OMethyl | DMD |
| | CCACCA | | mC*mA*mC*mC*mA*mU*mC* | | XXXXXXXXXX | | |
| | UCACCC | | mA*mC*mC*mC*mU*mC*mU* | | XXXX | | |
| | UCUGUG | | mG*mU*mG*mA | | | | |
| | A | | | | | | |
| WV-2263 | AAGGUC | 98 | mA*mA*mG*mG*mU*mC*mA* | 850 | XXXXXXXXXX | 25-mer 2′-OMethyl | DMD |
| | ACCCAC | | mC*mC*mC*mA*mC*mC*mA* | | XXXXXXXXXX | | |
| | CAUCAC | | mU*mC*mA*mC*mC*mC*mU* | | XXXX | | |
| | CCUCUG | | mC*mU*mG*mU | | | | |
| | U | | | | | | |
| WV-2264 | CAAGGU | 99 | mC*mA*mA*mG*mG*mU*mC* | 851 | XXXXXXXXXX | 25-mer 2′-OMethyl | DMD |
| | CACCCA | | mA*mC*mC*mC*mA*mC*mC* | | XXXXXXXXXX | | |
| | CCAUCA | | mA*mU*mC*mA*mC*mC*mC* | | XXXX | | |
| | CCCUCU | | mU*mC*mU*mG | | | | |
| | G | | | | | | |
| WV-2265 | UCAAGG | 100 | mU*mC*mA*mA*mG*mG*mU* | 852 | XXXXXXXXXX | 25-mer 2′-OMethyl | DMD |
| | UCACCC | | mC*mA*mC*mC*mC*mA*mC* | | XXXXXXXXXX | | |
| | ACCAUC | | mC*mA*mU*mC*mA*mC*mC* | | XXXX | | |
| | ACCCUC | | mC*mU*mC*mU | | | | |
| | U | | | | | | |
| WV-2266 | CUCAAG | 101 | mC*mU*mC*mA*mA*mG*mG* | 853 | XXXXXXXXXX | 25-mer 2′-OMethyl | DMD |
| | GUCACC | | mU*mC*mA*mC*mC*mC*mA* | | XXXXXXXXXX | | |
| | CACCAU | | mC*mC*mA*mU*mC*mA*mC* | | XXXX | | |
| | CACCCU | | mC*mC*mU*mC | | | | |
| | C | | | | | | |
| WV-2267 | CUUGAU | 102 | mC*mU*mU*mG*mA*mU*mC* | 854 | XXXXXXXXXX | 25-mer 2′-OMethyl | DMD |
| | CAAGCA | | mA*mA*mG*mC*mA*mG*mA* | | XXXXXXXXXX | | |
| | GAGAAA | | mG*mA*mA*mA*mG*mC*mC* | | XXXX | | |
| | GCCAGU | | mA*mG*mU*mC | | | | |
| | C | | | | | | |
| WV-2268 | AUAACU | 103 | mA*mU*mA*mA*mC*mU*mU* | 855 | XXXXXXXXXX | 25-mer 2′-OMethyl | DMD |
| | UGAUCA | | mG*mA*mU*mC*mA*mA*mG* | | XXXXXXXXXX | | |
| | AGCAGA | | mC*mA*mG*mA*mG*mA*mA* | | XXXX | | |
| | GAAAGC | | mA*mG*mC*mC | | | | |
| | C | | | | | | |
| WV-2273 | AGUAAC | 104 | mA*mG*mU*mA*mA*mC*mA* | 856 | XXXXXXXXXX | 20-mer 2′-OMethyl | DMD |
| | AGUCUG | | mG*mU*mC*mU*mG*mA*mG* | | XXXXXXXXX | | |
| | AGUAGG | | mU*mA*mG*mG*mA*mG | | | | |
| | AG | | | | | | |
| WV-2274 | GAGUAA | 105 | mG*mA*mG*mU*mA*mA*mC* | 857 | XXXXXXXXXX | 20-mer 2′-OMethyl | DMD |
| | CAGUCU | | mA*mG*mU*mC*mU*mG*mA* | | XXXXXXXXX | | |
| | GAGUAG | | mG*mU*mA*mG*mG*mA | | | | |
| | GA | | | | | | |
| WV-2275 | AGAGUA | 106 | mA*mG*mA*mG*mU*mA*mA* | 858 | XXXXXXXXXX | 20-mer 2′-OMethyl | DMD |
| | ACAGUC | | mC*mA*mG*mU*mC*mU*mG* | | XXXXXXXXX | | |
| | UGAGUA | | mA*mG*mU*mA*mG*mG | | | | |
| | GG | | | | | | |
| WV-2276 | CAGAGU | 107 | mC*mA*mG*mA*mG*mU*mA* | 859 | XXXXXXXXXX | 20-mer 2′-OMethyl | DMD |
| | AACAGU | | mA*mC*mA*mG*mU*mC*mU* | | XXXXXXXXX | | |
| | CUGAGU | | mG*mA*mG*mU*mA*mG | | | | |
| | AG | | | | | | |
| WV-2277 | GUCACC | 108 | mG*mU*mC*mA*mC*mC*mA* | 860 | XXXXXXXXXX | 20-mer 2′-OMethyl | DMD |
| | AGAGUA | | mG*mA*mG*mU*mA*mA*mC* | | XXXXXXXXX | | |
| | ACAGUC | | mA*mG*mU*mC*mU*mG | | | | |
| | UG | | | | | | |
| WV-2278 | UGUCAC | 109 | mU*mG*mU*mC*mA*mC*mC* | 86 | XXXXXXXXXX | 20-mer 2′-OMethyl | DMD |
| | CAGAGU | | mA*mG*mA*mG*mU*mA*mA* | | XXXXXXXXX | | |
| | AACAGU | | mC*mA*mG*mU*mC*mU | | | | |
| | CU | | | | | | |
| WV-2279 | GUGUCA | 110 | mG*mU*mG*mU*mC*mA*mC* | 862 | XXXXXXXXXX | 20-mer 2′-OMethyl | DMD |
| | CCAGAG | | mC*mA*mG*mA*mG*mU*mA* | | XXXXXXXXX | | |
| | UAACAG | | mA*mC*mA*mG*mU*mC | | | | |
| | UC | | | | | | |
| WV-2280 | UGUGUC | 111 | mU*mG*mU*mG*mU*mC*mA* | 863 | XXXXXXXXXX | 20-mer 2′-OMethyl | DMD |
| | ACCAGA | | mC*mC*mA*mG*mA*mG*mU* | | XXXXXXXXX | | |
| | GUAACA | | mA*mA*mC*mA*mG*mU | | | | |
| | GU | | | | | | |
| WV-2281 | UUGUGU | 112 | mU*mU*mG*mU*mG*mU*mC* | 864 | XXXXXXXXXX | 20-mer 2′-OMethyl | DMD |
| | CACCAG | | mA*mC*mC*mA*mG*mA*mG* | | XXXXXXXXX | | |
| | AGUAAC | | mU*mA*mA*mC*mA*mG | | | | |
| | AG | | | | | | |
| WV-2282 | GGUUGU | 113 | mG*mG*mU*mU*mG*mU*mG* | 865 | XXXXXXXXXX | 20-mer 2′-OMethyl | DMD |
| | GUCACC | | mU*mC*mA*mC*mC*mA*mG* | | XXXXXXXXX | | |
| | AGAGUA | | mA*mG*mU*mA*mA*mC | | | | |
| | AC | | | | | | |
| WV-2283 | AGGUUG | 114 | mA*mG*mG*mU*mU*mG*mU* | 866 | XXXXXXXXXX | 20-mer 2′-OMethyl | DMD |
| | UGUCAC | | mG*mU*mC*mA*mC*mC*mA* | | XXXXXXXXX | | |
| | CAGAGU | | mG*mA*mG*mU*mA*mA | | | | |
| | AA | | | | | | |
| WV-2284 | CAGGUU | 115 | mC*mA*mG*mG*mU*mU*mG* | 867 | XXXXXXXXXX | 20-mer 2′-OMethyl | DMD |
| | GUGUCA | | mU*mG*mU*mC*mA*mC*mC* | | XXXXXXXXX | | |
| | CCAGAG | | mA*mG*mA*mG*mU*mA | | | | |
| | UA | | | | | | |
| WV-2285 | ACAGGU | 116 | mA*mC*mA*mG*mG*mU*mU* | 868 | XXXXXXXXXX | 20-mer 2′-OMethyl | DMD |
| | UGUGUC | | mG*mU*mG*mU*mC*mA*mC* | | XXXXXXXXX | | |
| | ACCAGA | | mC*mA*mG*mA*mG*mU | | | | |
| | GU | | | | | | |
| WV-2286 | CACAGG | 117 | mC*mA*mC*mA*mG*mG*mU* | 869 | XXXXXXXXXX | 20-mer 2′-OMethyl | DMD |
| | UUGUGU | | mU*mG*mU*mG*mU*mC*mA* | | XXXXXXXXX | | |
| | CACCAG | | mC*mC*mA*mG*mA*mG | | | | |
| | AG | | | | | | |
| WV-2287 | CCACAG | 118 | mC*mC*mA*mC*mA*mG*mG* | 870 | XXXXXXXXXX | 20-mer 2′-OMethyl | DMD |
| | GUUGUG | | mU*mU*mG*mU*mG*mU*mC* | | XXXXXXXXX | | |
| | UCACCA | | mA*mC*mC*mA*mG*mA | | | | |
| | GA | | | | | | |
| WV-2288 | ACCACA | 119 | mA*mC*mC*mA*mC*mA*mG* | 871 | XXXXXXXXXX | 20-mer 2′-OMethyl | DMD |
| | GGUUGU | | mG*mU*mU*mG*mU*mG*mU* | | XXXXXXXXX | | |
| | GUCACC | | mC*mA*mC*mC*mA*mG | | | | |
| | AG | | | | | | |
| WV-2289 | AACCAC | 120 | mA*mA*mC*mC*mA*mC*mA* | 872 | XXXXXXXXXX | 20-mer 2′-OMethyl | DMD |
| | AGGUUG | | mG*mG*mU*mU*mG*mU*mG* | | XXXXXXXXX | | |
| | UGUCAC | | mU*mC*mA*mC*mC*mA | | | | |
| | CA | | | | | | |
| WV-2290 | UAACCA | 121 | mU*mA*mA*mC*mC*mA*mC* | 873 | XXXXXXXXXX | 20-mer 2′-OMethyl | DMD |
| | CAGGUU | | mA*mG*mG*mU*mU*mG*mU* | | XXXXXXXXX | | |
| | GUGUCA | | mG*mU*mC*mA*mC*mC | | | | |
| | CC | | | | | | |
| WV-2291 | GUAACC | 122 | mG*mU*mA*mA*mC*mC*mA* | 874 | XXXXXXXXXX | 20-mer 2′-OMethyl | DMD |
| | ACAGGU | | mC*mA*mG*mG*mU*mU*mG* | | XXXXXXXXX | | |
| | UGUGUC | | mU*mG*mU*mC*mA*mC | | | | |
| | AC | | | | | | |
| WV-2292 | AGUAAC | 123 | mA*mG*mU*mA*mA*mC*mC* | 875 | XXXXXXXXXX | 20-mer 2′-OMethyl | DMD |
| | CACAGG | | mA*mC*mA*mG*mG*mU*mU* | | XXXXXXXXX | | |
| | UUGUGU | | mG*mU*mG*mU*mC*mA | | | | |
| | CA | | | | | | |
| WV-2293 | CUUAGU | 124 | mC*mU*mU*mA*mG*mU*mA* | 876 | XXXXXXXXXX | 20-mer 2′-OMethyl | DMD |
| | AACCAC | | mA*mC*mC*mA*mC*mA*mG* | | XXXXXXXXX | | |
| | AGGUUG | | mG*mU*mU*mG*mU*mG | | | | |
| | UG | | | | | | |
| WV-2294 | CCUUAG | 125 | mC*mC*mU*mU*mA*mG*mU* | 877 | XXXXXXXXXX | 20-mer 2′-OMethyl | DMD |
| | UAACCA | | mA*mA*mC*mC*mA*mC*mA* | | XXXXXXXXX | | |
| | CAGGUU | | mG*mG*mU*mU*mG*mU | | | | |
| | GU | | | | | | |
| WV-2295 | UCCUUA | 126 | mU*mC*mC*mU*mU*mA*mG* | 878 | XXXXXXXXXX | 20-mer 2′-OMethyl | DMD |
| | GUAACC | | mU*mA*mA*mC*mC*mA*mC* | | XXXXXXXXX | | |
| | ACAGGU | | mA*mG*mG*mU*mU*mG | | | | |
| | UG | | | | | | |
| WV-2296 | UUCCUU | 127 | mU*mU*mC*mC*mU*mU*mA* | 879 | XXXXXXXXXX | 20-mer 2′-OMethyl | DMD |
| | AGUAAC | | mG*mU*mA*mA*mC*mC*mA* | | XXXXXXXXX | | |
| | CACAGG | | mC*mA*mG*mG*mU*mU | | | | |
| | UU | | | | | | |
| WV-2297 | UUUCCU | 128 | mU*mU*mU*mC*mC*mU*mU* | 880 | XXXXXXXXXX | 20-mer 2′-OMethyl | DMD |
| | UAGUAA | | mA*mG*mU*mA*mA*mC*mC* | | XXXXXXXXX | | |
| | CCACAG | | mA*mC*mA*mG*mG*mU | | | | |
| | GU | | | | | | |
| WV-2298 | GUUUCC | 129 | mG*mU*mU*mU*mC*mC*mU* | 881 | XXXXXXXXXX | 20-mer 2′-OMethyl | DMD |
| | UUAGUA | | mU*mA*mG*mU*mA*mA*mC* | | XXXXXXXXX | | |
| | ACCACA | | mC*mA*mC*mA*mG*mG | | | | |
| | GG | | | | | | |
| WV-2299 | AGUUUC | 130 | mA*mG*mU*mU*mU*mC*mC* | 882 | XXXXXXXXXX | 20-mer 2′-OMethyl | DMD |
| | CUUAGU | | mU*mU*mA*mG*mU*mA*mA* | | XXXXXXXXX | | |
| | AACCAC | | mC*mC*mA*mC*mA*mG | | | | |
| | AG | | | | | | |
| WV-2300 | GCAGUU | 131 | mG*mC*mA*mG*mU*mU*mU* | 883 | XXXXXXXXXX | 20-mer 2′-OMethyl | DMD |
| | UCCUUA | | mC*mC*mU*mU*mA*mG*mU* | | XXXXXXXXX | | |
| | GUAACC | | mA*mA*mC*mC*mA*mC | | | | |
| | AC | | | | | | |
| WV-2301 | GGCAGU | 132 | mG*mG*mC*mA*mG*mU*mU* | 884 | XXXXXXXXXX | 20-mer 2′-OMethyl | DMD |
| | UUCCUU | | mU*mC*mC*mU*mU*mA*mG* | | XXXXXXXXX | | |
| | AGUAAC | | mU*mA*mA*mC*mC*mA | | | | |
| | CA | | | | | | |
| WV-2302 | UGGCAG | 133 | mU*mG*mG*mC*mA*mG*mU* | 885 | XXXXXXXXXX | 20-mer 2′-OMethyl | DMD |
| | UUUCCU | | mU*mU*mC*mC*mU*mU*mA* | | XXXXXXXXX | | |
| | UAGUAA | | mG*mU*mA*mA*mC*mC | | | | |
| | CC | | | | | | |
| WV-2303 | AUGGCA | 134 | mA*mU*mG*mG*mC*mA*mG* | 886 | XXXXXXXXXX | 20-mer 2′-OMethyl | DMD |
| | GUUUCC | | mU*mU*mU*mC*mC*mU*mU* | | XXXXXXXXX | | |
| | UUAGUA | | mA*mG*mU*mA*mA*mC | | | | |
| | AC | | | | | | |
| WV-2304 | GAUGGC | 135 | mG*mA*mU*mG*mG*mC*mA* | 887 | XXXXXXXXXX | 20-mer 2′-OMethyl | DMD |
| | AGUUUC | | mG*mU*mU*mU*mC*mC*mU* | | XXXXXXXXX | | |
| | CUUAGU | | mU*mA*mG*mU*mA*mA | | | | |
| | AA | | | | | | |
| WV-2305 | AGAUGG | 136 | mA*mG*mA*mU*mG*mG*mC* | 888 | XXXXXXXXXX | 20-mer 2′-OMethyl | DMD |
| | CAGUUU | | mA*mG*mU*mU*mU*mC*mC* | | XXXXXXXXX | | |
| | CCUUAG | | mU*mU*mA*mG*mU*mA | | | | |
| | UA | | | | | | |
| WV-2306 | GGAGAU | 137 | mG*mG*mA*mG*mA*mU*mG* | 889 | XXXXXXXXXX | 20-mer 2′-OMethyl | DMD |
| | GGCAGU | | mG*mC*mA*mG*mU*mU*mU* | | XXXXXXXXX | | |
| | UUCCUU | | mC*mC*mU*mU*mA*mG | | | | |
| | AG | | | | | | |
| WV-2307 | UGGAGA | 138 | mU*mG*mG*mA*mG*mA*mU* | 890 | XXXXXXXXXX | 20-mer 2′-OMethyl | DMD |
| | UGGCAG | | mG*mG*mC*mA*mG*mU*mU* | | XXXXXXXXX | | |
| | UUUCCU | | mU*mC*mC*mU*mU*mA | | | | |
| | UA | | | | | | |
| WV-2308 | UUGGAG | 139 | mU*mU*mG*mG*mA*mG*mA* | 891 | XXXXXXXXXX | 20-mer 2′-OMethyl | DMD |
| | AUGGCA | | mU*mG*mG*mC*mA*mG*mU* | | XXXXXXXXX | | |
| | GUUUCC | | mU*mU*mC*mC*mU*mU | | | | |
| | UU | | | | | | |
| WV-2309 | UUUGGA | 140 | mU*mU*mU*mG*mG*mA*mG* | 892 | XXXXXXXXXX | 20-mer 2′-OMethyl | DMD |
| | GAUGGC | | mA*mU*mG*mG*mC*mA*mG* | | XXXXXXXXX | | |
| | AGUUUC | | mU*mU*mU*mC*mC*mU | | | | |
| | CU | | | | | | |
| WV-2310 | GUUUGG | 141 | mG*mU*mU*mU*mG*mG*mA* | 893 | XXXXXXXXXX | 20-mer 2′-OMethyl | DMD |
| | AGAUGG | | mG*mA*mU*mG*mG*mC*mA* | | XXXXXXXXX | | |
| | CAGUUU | | mG*mU*mU*mU*mC*mC | | | | |
| | CC | | | | | | |
| WV-2311 | CUAGUU | 142 | mC*mU*mA*mG*mU*mU*mU* | 894 | XXXXXXXXXX | 20-mer 2′-OMethyl | DMD |
| | UGGAGA | | mG*mG*mA*mG*mA*mU*mG* | | XXXXXXXXX | | |
| | UGGCAG | | mG*mC*mA*mG*mU*mU | | | | |
| | UU | | | | | | |
| WV-2312 | UCUAGU | 143 | mU*mC*mU*mA*mG*mU*mU* | 895 | XXXXXXXXXX | 20-mer 2′-OMethyl | DMD |
| | UUGGAG | | mU*mG*mG*mA*mG*mA*mU* | | XXXXXXXXX | | |
| | AUGGCA | | mG*mG*mC*mA*mG*mU | | | | |
| | GU | | | | | | |
| WV-2313 | AUUUCU | 144 | mA*mU*mU*mU*mC*mU*mA* | 896 | XXXXXXXXXX | 20-mer 2′-OMethyl | DMD |
| | AGUUUG | | mG*mU*mU*mU*mG*mG*mA* | | XXXXXXXXX | | |
| | GAGAUG | | mG*mA*mU*mG*mG*mC | | | | |
| | GC | | | | | | |
| WV-2314 | UGGCAU | 145 | mU*mG*mG*mC*mA*mU*mU* | 897 | XXXXXXXXXX | 20-mer 2′-OMethyl | DMD |
| | UUCUAG | | mU*mC*mU*mA*mG*mU*mU* | | XXXXXXXXX | | |
| | UUUGGA | | mU*mG*mG*mA*mG*mA | | | | |
| | GA | | | | | | |
| WV-2315 | GAUGGC | 146 | mG*mA*mU*mG*mG*mC*mA* | 898 | XXXXXXXXXX | 20-mer 2′-OMethyl | DMD |
| | AUUUCU | | mU*mU*mU*mC*mU*mA*mG* | | XXXXXXXXX | | |
| | AGUUUG | | mU*mU*mU*mG*mG*mA | | | | |
| | GA | | | | | | |
| WV-2316 | AGAUGG | 147 | mA*mG*mA*mU*mG*mG*mC* | 899 | XXXXXXXXXX | 20-mer 2′-OMethyl | DMD |
| | CAUUUC | | mA*mU*mU*mU*mC*mU*mA* | | XXXXXXXXX | | |
| | UAGUUU | | mG*mU*mU*mU*mG*mG | | | | |
| | GG | | | | | | |
| WV-2317 | AAGAUG | 148 | mA*mA*mG*mA*mU*mG*mG* | 900 | XXXXXXXXXX | 20-mer 2′-OMethyl | DMD |
| | GCAUUU | | mC*mA*mU*mU*mU*mC*mU* | | XXXXXXXXX | | |
| | CUAGUU | | mA*mG*mU*mU*mU*mG | | | | |
| | UG | | | | | | |
| WV-2318 | AGGAAG | 149 | mA*mG*mG*mA*mA*mG*mA* | 901 | XXXXXXXXXX | 20-mer 2′-OMethyl | DMD |
| | AUGGCA | | mU*mG*mG*mC*mA*mU*mU* | | XXXXXXXXX | | |
| | UUUCUA | | mU*mC*mU*mA*mG*mU | | | | |
| | GU | | | | | | |
| WV-2319 | AAGGAA | 150 | mA*mA*mG*mG*mA*mA*mG* | 902 | XXXXXXXXXX | 20-mer 2′-OMethyl | DMD |
| | GAUGGC | | mA*mU*mG*mG*mC*mA*mU* | | XXXXXXXXX | | |
| | AUUUCU | | mU*mU*mC*mU*mA*mG | | | | |
| | AG | | | | | | |
| WV-2320 | CAAGGA | 151 | mC*mA*mA*mG*mG*mA*mA* | 903 | XXXXXXXXXX | 20-mer 2′-OMethyl | DMD |
| | AGAUGG | | mG*mA*mU*mG*mG*mC*mA* | | XXXXXXXXX | | |
| | CAUUUC | | mU*mU*mU*mC*mU*mA | | | | |
| | UA | | | | | | |
| WV-2321 | UCAAGG | 152 | mU*mC*mA*mA*mG*mG*mA* | 904 | XXXXXXXXXX | 20-mer 2′-OMethyl | DMD |
| | AAGAUG | | mA*mG*mA*mU*mG*mG*mC* | | XXXXXXXXX | | |
| | GCAUUU | | mA*mU*mU*mU*mC*mU | | | | |
| | CU | | | | | | |
| WV-2322 | ACAUCA | 153 | mA*mC*mA*mU*mC*mA*mA* | 905 | XXXXXXXXXX | 20-mer 2′-OMethyl | DMD |
| | AGGAAG | | mG*mG*mA*mA*mG*mA*mU* | | XXXXXXXXX | | |
| | AUGGCA | | mG*mG*mC*mA*mU*mU | | | | |
| | UU | | | | | | |
| WV-2323 | CAACAU | 154 | mC*mA*mA*mC*mA*mU*mC* | 906 | XXXXXXXXXX | 20-mer 2′-OMethyl | DMD |
| | CAAGGA | | mA*mA*mG*mG*mA*mA*mG* | | XXXXXXXXX | | |
| | AGAUGG | | mA*mU*mG*mG*mC*mA | | | | |
| | CA | | | | | | |
| WV-2324 | UCCAAC | 155 | mU*mC*mC*mA*mA*mC*mA* | 907 | XXXXXXXXXX | 20-mer 2′-OMethyl | DMD |
| | AUCAAG | | mU*mC*mA*mA*mG*mG*mA* | | XXXXXXXXX | | |
| | GAAGAU | | mA*mG*mA*mU*mG*mG | | | | |
| | GG | | | | | | |
| WV-2325 | CCUCCA | 156 | mC*mC*mU*mC*mC*mA*mA* | 908 | XXXXXXXXXX | 20-mer 2′-OMethyl | DMD |
| | ACAUCA | | mC*mA*mU*mC*mA*mA*mG* | | XXXXXXXXX | | |
| | AGGAAG | | mG*mA*mA*mG*mA*mU | | | | |
| | AU | | | | | | |
| WV-2326 | AGGUAC | 157 | mA*mG*mG*mU*mA*mC*mC* | 909 | XXXXXXXXXX | 20-mer 2′-OMethyl | DMD |
| | CUCCAA | | mU*mC*mC*mA*mA*mC*mA* | | XXXXXXXXX | | |
| | CAUCAA | | mU*mC*mA*mA*mG*mG | | | | |
| | GG | | | | | | |
| WV-2327 | CAGGUA | 158 | mC*mA*mG*mG*mU*mA*mC* | 910 | XXXXXXXXXX | 20-mer 2′-OMethyl | DMD |
| | CCUCCA | | mC*mU*mC*mC*mA*mA*mC* | | XXXXXXXXX | | |
| | ACAUCA | | mA*mU*mC*mA*mA*mG | | | | |
| | AG | | | | | | |
| WV-2328 | AGAGCA | 159 | mA*mG*mA*mG*mC*mA*mG* | 911 | XXXXXXXXXX | 20-mer 2′-OMethyl | DMD |
| | GGUACC | | mG*mU*mA*mC*mC*mU*mC* | | XXXXXXXXX | | |
| | UCCAAC | | mC*mA*mA*mC*mA*mU | | | | |
| | AU | | | | | | |
| WV-2329 | CAGAGC | 160 | mC*mA*mG*mA*mG*mC*mA* | 912 | XXXXXXXXXX | 20-mer 2′-OMethyl | DMD |
| | AGGUAC | | mG*mG*mU*mA*mC*mC*mU* | | XXXXXXXXX | | |
| | CUCCAA | | mC*mC*mA*mA*mC*mA | | | | |
| | CA | | | | | | |
| WV-2330 | CCAGAG | 161 | mC*mC*mA*mG*mA*mG*mC* | 913 | XXXXXXXXXX | 20-mer 2′-OMethyl | DMD |
| | CAGGUA | | mA*mG*mG*mU*mA*mC*mC* | | XXXXXXXXX | | |
| | CCUCCA | | mU*mC*mC*mA*mA*mC | | | | |
| | AC | | | | | | |
| WV-2331 | GCCAGA | 162 | mG*mC*mC*mA*mG*mA*mG* | 914 | XXXXXXXXXX | 20-mer 2′-OMethyl | DMD |
| | GCAGGU | | mC*mA*mG*mG*mU*mA*mC* | | XXXXXXXXX | | |
| | ACCUCC | | mC*mU*mC*mC*mA*mA | | | | |
| | AA | | | | | | |
| WV-2332 | UGCCAG | 163 | mU*mG*mC*mC*mA*mG*mA* | 915 | XXXXXXXXXX | 20-mer 2′-OMethyl | DMD |
| | AGCAGG | | mG*mC*mA*mG*mG*mU*mA* | | XXXXXXXXX | | |
| | UACCUC | | mC*mC*mU*mC*mC*mA | | | | |
| | CA | | | | | | |
| WV-2333 | CUGCCA | 164 | mC*mU*mG*mC*mC*mA*mG* | 916 | XXXXXXXXXX | 20-mer 2′-OMethyl | DMD |
| | GAGCAG | | mA*mG*mC*mA*mG*mG*mU* | | XXXXXXXXX | | |
| | GUACCU | | mA*mC*mC*mU*mC*mC | | | | |
| | CC | | | | | | |
| WV-2334 | UCUGCC | 165 | mU*mC*mU*mG*mC*mC*mA* | 917 | XXXXXXXXXX | 20-mer 2′-OMethyl | DMD |
| | AGAGCA | | mG*mA*mG*mC*mA*mG*mG* | | XXXXXXXXX | | |
| | GGUACC | | mU*mA*mC*mC*mU*mC | | | | |
| | UC | | | | | | |
| WV-2335 | AUCUGC | 166 | mA*mU*mC*mU*mG*mC*mC* | 918 | XXXXXXXXXX | 20-mer 2′-OMethyl | DMD |
| | CAGAGC | | mA*mG*mA*mG*mC*mA*mG* | | XXXXXXXXX | | |
| | AGGUAC | | mG*mU*mA*mC*mC*mU | | | | |
| | CU | | | | | | |
| WV-2336 | UUGAAA | 167 | mU*mU*mG*mA*mA*mA*mU* | 919 | XXXXXXXXXX | 20-mer 2′-OMethyl | DMD |
| | UCUGCC | | mC*mU*mG*mC*mC*mA*mG* | | XXXXXXXXX | | |
| | AGAGCA | | mA*mG*mC*mA*mG*mG | | | | |
| | GG | | | | | | |
| WV-2337 | CCCGGU | 168 | mC*mC*mC*mG*mG*mU*mU* | 920 | XXXXXXXXXX | 20-mer 2′-OMethyl | DMD |
| | UGAAAU | | mG*mA*mA*mA*mU*mC*mU* | | XXXXXXXXX | | |
| | CUGCCA | | mG*mC*mC*mA*mG*mA | | | | |
| | GA | | | | | | |
| WV-2338 | GCCCGG | 169 | mG*mC*mC*mC*mG*mG*mU* | 921 | XXXXXXXXXX | 20-mer 2′-OMethyl | DMD |
| | UUGAAA | | mU*mG*mA*mA*mA*mU*mC* | | XXXXXXXXX | | |
| | UCUGCC | | mU*mG*mC*mC*mA*mG | | | | |
| | AG | | | | | | |
| WV-2339 | AGCCCG | 170 | mA*mG*mC*mC*mC*mG*mG* | 922 | XXXXXXXXXX | 20-mer 2′-OMethyl | DMD |
| | GUUGAA | | mU*mU*mG*mA*mA*mA*mU* | | XXXXXXXXX | | |
| | AUCUGC | | mC*mU*mG*mC*mC*mA | | | | |
| | CA | | | | | | |
| WV-2340 | CCAAGC | 171 | mC*mC*mA*mA*mG*mC*mC* | 923 | XXXXXXXXXX | 20-mer 2′-OMethyl | DMD |
| | CCGGUU | | mC*mG*mG*mU*mU*mG*mA* | | XXXXXXXXX | | |
| | GAAAUC | | mA*mA*mU*mC*mU*mG | | | | |
| | UG | | | | | | |
| WV-2341 | UCCAAG | 172 | mU*mC*mC*mA*mA*mG*mC* | 924 | XXXXXXXXXX | 20-mer 2′-OMethyl | DMD |
| | CCCGGU | | mC*mC*mG*mG*mU*mU*mG* | | XXXXXXXXX | | |
| | UGAAAU | | mA*mA*mA*mU*mC*mU | | | | |
| | CU | | | | | | |
| WV-2342 | GUCCAA | 173 | mG*mU*mC*mC*mA*mA*mG* | 925 | XXXXXXXXXX | 20-mer 2′-OMethyl | DMD |
| | GCCCGG | | mC*mC*mC*mG*mG*mU*mU* | | XXXXXXXXX | | |
| | UUGAAA | | mG*mA*mA*mA*mU*mC | | | | |
| | UC | | | | | | |
| WV-2343 | UGUCCA | 174 | mU*mG*mU*mC*mC*mA*mA* | 926 | XXXXXXXXXX | 20-mer 2′-OMethyl | DMD |
| | AGCCCG | | mG*mC*mC*mC*mG*mG*mU* | | XXXXXXXXX | | |
| | GUUGAA | | mU*mG*mA*mA*mA*mU | | | | |
| | AU | | | | | | |
| WV-2344 | CUGUCC | 175 | mC*mU*mG*mU*mC*mC*mA* | 927 | XXXXXXXXXX | 20-mer 2′-OMethyl | DMD |
| | AAGCCC | | mA*mG*mC*mC*mC*mG*mG* | | XXXXXXXXX | | |
| | GGUUGA | | mU*mU*mG*mA*mA*mA | | | | |
| | AA | | | | | | |
| WV-2345 | UCUGUC | 176 | mU*mC*mU*mG*mU*mC*mC* | 928 | XXXXXXXXXX | 20-mer 2′-OMethyl | DMD |
| | CAAGCC | | mA*mA*mG*mC*mC*mC*mG* | | XXXXXXXXX | | |
| | CGGUUG | | mG*mU*mU*mG*mA*mA | | | | |
| | AA | | | | | | |
| WV-2346 | UUCUGU | 177 | mU*mU*mC*mU*mG*mU*mC* | 929 | XXXXXXXXXX | 20-mer 2′-OMethyl | DMD |
| | CCAAGC | | mC*mA*mA*mG*mC*mC*mC* | | XXXXXXXXX | | |
| | CCGGUU | | mG*mG*mU*mU*mG*mA | | | | |
| | GA | | | | | | |
| WV-2347 | GUUCUG | 178 | mG*mU*mU*mC*mU*mG*mU* | 930 | XXXXXXXXXX | 20-mer 2′-OMethyl | DMD |
| | UCCAAG | | mC*mC*mA*mA*mG*mC*mC* | | XXXXXXXXX | | |
| | CCCGGU | | mC*mG*mG*mU*mU*mG | | | | |
| | UG | | | | | | |
| WV-2348 | AGUUCU | 179 | mA*mG*mU*mU*mC*mU*mG* | 931 | XXXXXXXXXX | 20-mer 2′-OMethyl | DMD |
| | GUCCAA | | mU*mC*mC*mA*mA*mG*mC* | | XXXXXXXXX | | |
| | GCCCGG | | mC*mC*mG*mG*mU*mU | | | | |
| | UU | | | | | | |
| WV-2349 | AAGUUC | 180 | mA*mA*mG*mU*mU*mC*mU* | 932 | XXXXXXXXXX | 20-mer 2′-OMethyl | DMD |
| | UGUCCA | | mG*mU*mC*mC*mA*mA*mG* | | XXXXXXXXX | | |
| | AGCCCG | | mC*mC*mC*mG*mG*mU | | | | |
| | GU | | | | | | |
| WV-2350 | UAAGUU | 181 | mU*mA*mA*mG*mU*mU*mC* | 933 | XXXXXXXXXX | 20-mer 2′-OMethyl | DMD |
| | CUGUCC | | mU*mG*mU*mC*mC*mA*mA* | | XXXXXXXXX | | |
| | AAGCCC | | mG*mC*mC*mC*mG*mG | | | | |
| | GG | | | | | | |
| WV-2351 | GUAAGU | 182 | mG*mU*mA*mA*mG*mU*mU* | 934 | XXXXXXXXXX | 20-mer 2′-OMethyl | DMD |
| | UCUGUC | | mC*mU*mG*mU*mC*mC*mA* | | XXXXXXXXX | | |
| | CAAGCC | | mA*mG*mC*mC*mC*mG | | | | |
| | CG | | | | | | |
| WV-2352 | GGUAAG | 183 | mG*mG*mU*mA*mA*mG*mU* | 935 | XXXXXXXXXX | 20-mer 2′-OMethyl | DMD |
| | UUCUGU | | mU*mC*mU*mG*mU*mC*mC* | | XXXXXXXXX | | |
| | CCAAGC | | mA*mA*mG*mC*mC*mC | | | | |
| | CC | | | | | | |
| WV-2353 | CAGUCG | 184 | mC*mA*mG*mU*mC*mG*mG* | 936 | XXXXXXXXXX | 20-mer 2′-OMethyl | DMD |
| | GUAAGU | | mU*mA*mA*mG*mU*mU*mC* | | XXXXXXXXX | | |
| | UCUGUC | | mU*mG*mU*mC*mC*mA | | | | |
| | CA | | | | | | |
| WV-2354 | CCAGUC | 185 | mC*mC*mA*mG*mU*mC*mG* | 937 | XXXXXXXXXX | 20-mer 2′-OMethyl | DMD |
| | GGUAAG | | mG*mU*mA*mA*mG*mU*mU* | | XXXXXXXXX | | |
| | UUCUGU | | mC*mU*mG*mU*mC*mC | | | | |
| | CC | | | | | | |
| WV-2355 | CCACCA | 186 | mC*mC*mA*mC*mC*mA*mU* | 938 | XXXXXXXXXX | 20-mer 2′-OMethyl | DMD |
| | UCACCC | | mC*mA*mC*mC*mC*mU*mC* | | XXXXXXXXX | | |
| | UCUGUG | | mU*mG*mU*mG*mA*mU | | | | |
| | AU | | | | | | |
| WV-2356 | CCCACC | 187 | mC*mC*mC*mA*mC*mC*mA* | 939 | XXXXXXXXXX | 20-mer 2′-OMethyl | DMD |
| | AUCACC | | mU*mC*mA*mC*mC*mC*mU* | | XXXXXXX | | |
| | CUCUGU | | mC*mU*mG*mU*mG*mA | | | | |
| | GA | | | | | | |
| WV-2357 | CACCCA | 188 | mC*mA*mC*mC*mC*mA*mC* | 940 | XXXXXXXXXX | 20-mer 2′-OMethyl | DMD |
| | CCAUCA | | mC*mA*mU*mC*mA*mC*mC* | | XXXXXXXXX | | |
| | CCCUCU | | mC*mU*mC*mU*mG*mU | | | | |
| | GU | | | | | | |
| WV-2358 | UCACCC | 189 | mU*mC*mA*mC*mC*mC*mA* | 941 | XXXXXXXXXX | 20-mer 2′-OMethyl | DMD |
| | ACCAUC | | mC*mC*mA*mU*mC*mA*mC* | | XXXXXXXXX | | |
| | ACCCUC | | mC*mC*mU*mC*mU*mG | | | | |
| | UG | | | | | | |
| WV-2359 | GUCACC | 190 | mG*mU*mC*mA*mC*mC*mC* | 942 | XXXXXXXXXX | 20-mer 2′-OMethyl | DMD |
| | CACCAU | | mA*mC*mC*mA*mU*mC*mA* | | XXXXXXXXX | | |
| | CACCCU | | mC*mC*mC*mU*mC*mU | | | | |
| | CU | | | | | | |
| WV-2360 | GGUCAC | 191 | mG*mG*mU*mC*mA*mC*mC* | 943 | XXXXXXXXXX | 20-mer 2′-OMethyl | DMD |
| | CCACCA | | mC*mA*mC*mC*mA*mU*mC* | | XXXXXXXXX | | |
| | UCACCC | | mA*mC*mC*mC*mU*mC | | | | |
| | UC | | | | | | |
| WV-2361 | UCAAGC | 192 | mU*mC*mA*mA*mG*mC*mA* | 944 | XXXXXXXXXX | 20-mer 2′-OMethyl | DMD |
| | AGAGAA | | mG*mA*mG*mA*mA*mA*mG* | | XXXXXXXXX | | |
| | AGCCAG | | mC*mC*mA*mG*mU*mC | | | | |
| | UC | | | | | | |
| WV-2362 | UUGAUC | 193 | mU*mU*mG*mA*mU*mC*mA* | 945 | XXXXXXXXXX | 20-mer 2′-OMethyl | DMD |
| | AAGCAG | | mA*mG*mC*mA*mG*mA*mG* | | XXXXXXXXX | | |
| | AGAAAG | | mA*mA*mA*mG*mC*mC | | | | |
| | CC | | | | | | |
| WV-2625 | CAAAGA | 194 | mC*mA*mA*mA*mG*mA*mA* | 946 | XXXXXXXXXX | based on WV-2223 | DMD |
| | AGAUGG | | mG*mA*mU*mG*mG*mC*mA* | | XXXXXXXXXX | match mouse target | |
| | CAUUUC | | mU*mU*mU*mC*mU*mA*mG* | | XXXX | sequence | |
| | UAGUUU | | mU*mU*mU*mG | | | | |
| | G | | | | | | |
| WV-2627 | GCAAAG | 195 | mG*mC*mA*mA*mA*mG*mA* | 947 | XXXXXXXXXX | based on WV-942 | DMD |
| | AAGAUG | | mA*mG*mA*mU*mG*mG*mC* | | XXXXXXXXX | match mouse target | |
| | GCAUUU | | mA*mU*mU*mU*mC*mU | | | sequence | |
| | CU | | | | | | |
| WV-2628 | GCAAAG | 196 | fG*fC*fA*fA*fA*fG*mA*mA*m | 948 | XXXXXXXXXX | based on WV-1714 | DMD |
| | AAGAUG | | G*mA*mU*mG*mG*mC*fA*fU | | XXXXXXXXX | match mouse target | |
| | GCAUUU | | *fU*fU*fC*fU | | | sequence | |
| | CU | | | | | | |
| WV-2095 | UCAAGG | 197 | fU*fC*fA*fA*fG*mG*mA*mA* | 949 | XXXXXXXXXX | Exon51: 5F-10OMe- | DMD |
| | AAGAUG | | mG*mA*mU*mG*mG*mC*mA* | | XXXXXXXXX | 5F all-PS | Exon51 |
| | GCAUUU | | fU*fU*fU*fC*fU | | | | |
| | CU | | | | | | |
| WV-2096 | UCAAGG | 198 | fU*fC*fA*fA*mG*mG*mA*mA | 950 | XXXXXXXXXX | Exon51: 4F-12OMe- | DMD |
| | AAGAUG | | *mG*mA*mU*mG*mG*mC*mA | | XXXXXXXXX | 4F all-PS | Exon51 |
| | GCAUUU | | *mU*fU*fU*fC*fU | | | | |
| | CU | | | | | | |
| WV-2097 | UCAAGG | 199 | fU*fC*fA*mA*mG*mG*mA*mA | 951 | XXXXXXXXXX | Exon51: 3F-14OMe- | DMD |
| | AAGAUG | | *mG*mA*mU*mG*mG*mC*mA | | XXXXXXXXX | 3F all-PS | Exon51 |
| | GCAUUU | | *mU*mU*fU*fC*fU | | | | |
| | CU | | | | | | |
| WV-2098 | UCAAGG | 200 | fU*fC*mA*mA*mG*mG*mA*m | 952 | XXXXXXXXXX | Exon51: 2F-16OMe- | DMD |
| | AAGAUG | | A*mG*mA*mU*mG*mG*mC*m | | XXXXXXXXX | 2F all-PS | Exon51 |
| | GCAUUU | | A*mU*mU*mU*fC*fU | | | | |
| | CU | | | | | | |
| WV-2099 | UCAAGG | 201 | fU*mC*mA*mA*mG*mG*mA* | 953 | XXXXXXXXXX | Exon51: 1F-18OMe- | DMD |
| | AAGAUG | | mA*mG*mA*mU*mG*mG*mC* | | XXXXXXXXX | 1F all-PS | Exon51 |
| | GCAUUU | | mA*mU*mU*mU*mC*fU | | | | |
| | CU | | | | | | |
| WV-2100 | UCAAGG | 202 | fU*fC*fA*fA*fG*fGmA*mA*m | 954 | XXXXXOXXXX | Exon51: 6F-8OMe-6F | DMD |
| | AAGAUG | | G*mA*mU*mG*mG*mCfA*fU*f | | XXXOXXXXX | 5PS-1PO-7PS-1PO-5PS | Exon51 |
| | GCAUUU | | U*fU*fC*fU | | | | |
| | CU | | | | | | |
| WV-2101 | UCAAGG | 203 | fU*fC*fA*fA*fGfGmA*mA*mG | 955 | XXXXOOXXXX | Exon51: 6F-8OMe-6F | DMD |
| | AAGAUG | | *mA*mU*mG*mG*mCfAfU*fU* | | XXXOOXXXX | 4PS-2PO-7PS-2PO-4PS | Exon51 |
| | GCAUUU | | fU*fC*fU | | | | |
| | CU | | | | | | |
| WV-2102 | UCAAGG | 204 | fU*fC*fA*fAfGfGmA*mA*mG* | 956 | XXXOOOXXXX | Exon51: 6F-8OMe-6F | DMD |
| | AAGAUG | | mA*mU*mG*mG*mCfAfUfU*f | | XXXOOOXXX | 3PS-3PO-7PS-3PO-3PS | Exon51 |
| | GCAUUU | | U*fC*fU | | | | |
| | CU | | | | | | |
| WV-2103 | UCAAGG | 205 | fU*fC*fAfAfGfGmA*mA*mG*m | 957 | XXOOOOXXXX | Exon51: 6F-8OMe-6F | DMD |
| | AAGAUG | | A*mU*mG*mG*mCfAfUfUfU*f | | XXXOOOOXX | 2PS-4PO-7PS-4PO-2PS | Exon51 |
| | GCAUUU | | C*fU | | | | |
| | CU | | | | | | |
| WV-2104 | UCAAGG | 206 | fU*fCfAfAfGfGmA*mA*mG*m | 958 | XOOOOOXXXX | Exon51: 6F-8OMe-6F | DMD |
| | AAGAUG | | A*mU*mG*mG*mCfAfUfUfUfC | | XXXOOOOOX | 1PS-5PO-7PS-5PO-1PS | Exon51 |
| | GCAUUU | | *fU | | | | |
| | CU | | | | | | |
| WV-2105 | UCAAGG | 207 | fUfCfAfAfGfGmA*mA*mG*mA | 959 | OOOOOOXXXX | Exon51: 6F-8OMe-6F | DMD |
| | AAGAUG | | *mU*mG*mG*mCfAfUfUfUfCf | | XXXOOOOOO | 6PO-7PS-6PO | Exon51 |
| | GCAUUU | | U | | | | |
| | CU | | | | | | |
| WV-2106 | UCAAGG | 208 | fU*fC*fA*fA*fG*fG*fA*fA*fG* | 960 | XXXXXXXXXX | Exon51: 10F-10OMe | DMD |
| | AAGAUG | | fA*mU*mG*mG*mC*mA*mU* | | XXXXXXXXX | all-PS | Exon51 |
| | GCAUUU | | mU*mU*mC*mU | | | | |
| | CU | | | | | | |
| WV-2107 | UCAAGG | 209 | mU*mC*mA*mA*mG*mG*mA* | 961 | XXXXXXXXXX | Exon51: 10OMe-10F | DMD |
| | AAGAUG | | mA*mG*mA*fU*fG*fG*fC*fA*f | | XXXXXXXXX | all-PS | Exon51 |
| | GCAUUU | | U*fU*fU*fC*fU | | | | |
| | CU | | | | | | |
| WV-2108 | UCAAGG | 210 | fU*fC*fA*fA*fG*fG*mA*mA*m | 962 | XXXXXXXXXX | Exon51: 6F-14OMe | DMD |
| | AAGAUG | | G*mA*mU*mG*mG*mC*mA*m | | XXXXXXXXX | all-PS | Exon51 |
| | GCAUUU | | U*mU*mU*mC*mU | | | | |
| | CU | | | | | | |
| WV-2109 | UCAAGG | 211 | mU*mC*mA*mA*mG*mG*mA* | 963 | XXXXXXXXXX | Exon51: 14OMe-6F | DMD |
| | AAGAUG | | mA*mG*mA*mU*mG*mG*mC* | | XXXXXXXXX | all-PS | Exon51 |
| | GCAUUU | | fA*fU*fU*fU*fC*fU | | | | |
| | CU | | | | | | |
| WV-884 | UCAAGG | 212 | mU*RmC*RmA*RmA*RmG*Rm | 964 | RRRRRRRRRRR | All-R; 2′-OMe oligo | Dystrophin |
| | AAGAUG | | G*RmA*RmA*RmG*RmA*RmU | | RRRRRRRR | | |
| | GCAUUU | | *RmG*RmG*RmC*RmA*RmU* | | | | |
| | CU | | RmU*RmU*RmC*RmU | | | | |
| WV-885 | UCAAGG | 213 | mU*SmC*RmA*SmA*RmG*Sm | 965 | SRSRSRSRSRSR | (SR)9S; 2′-OMe oligo | Dystrophin |
| | AAGAUG | | G*RmA*SmA*RmG*SmA*RmU | | SRSRSRS | | |
| | GCAUUU | | *SmG*RmG*SmC*RmA*SmU*R | | | | |
| | CU | | mU*SmU*RmC*SmU | | | | |
| WV-886 | UCAAGG | 214 | mU*RmC*RmA*RmA*SmG*Sm | 966 | RRRSSSSSSSSS | R3S13R3; 2′-OMe | Dystrophin |
| | AAGAUG | | G*SmA*SmA*SmG*SmA*SmU* | | SSSSRRR | oligo | |
| | GCAUUU | | SmG*SmG*SmC*SmA*SmU*Sm | | | | |
| | CU | | U*RmU*RmC*RmU | | | | |
| WV-887 | UCAAGG | 215 | mU*SmC*SmA*SmA*RmG*Rm | 967 | SSSRRRRRRRR | S3R13S3; 2′-OMe | Dystrophin |
| | AAGAUG | | G*RmA*RmA*RmG*RmA*RmU | | RRRRRSSS | oligo | |
| | GCAUUU | | *RmG*RmG*RmC*RmA*RmU* | | | | |
| | CU | | RmU*SmU*SmC*SmU | | | | |
| WV-888 | UCAAGG | 216 | mU*RmC*RmA*RmA*RmG*Rm | 968 | RRRRRSSRSSR | R5(SSR)3R5; 2′-OMe | Dystrophin |
| | AAGAUG | | G*SmA*SmA*RmG*SmA*SmU* | | SSRRRRRR | oligo | |
| | GCAUUU | | RmG*SmG*SmC*RmA*RmU*R | | | | |
| | CU | | mU*RmU*RmC*RmU | | | | |
| WV-889 | UCAAGG | 217 | mU*SmC*SmA*SmA*SmG*Sm | 969 | SSSSSRRSRRSR | S5(RRS)3S5; 2′-OMe | Dystrophin |
| | AAGAUG | | G*RmA*RmA*SmG*RmA*RmU | | RSSSSSS | oligo | |
| | GCAUUU | | *SmG*RmG*RmC*SmA*SmU*S | | | | |
| | CU | | mU*SmU*SmC*SmU | | | | |
| WV-890 | UCAAGG | 218 | mU*RmC*RmA*RmA*SmG*Sm | 970 | RRRSSRRSRRR | R3S2R2SR3SR2S2R3 | Dystrophin |
| | AAGAUG | | G*RmA*RmA*SmG*RmA*RmU | | SRRSSRRR | 2′-OMe oligo | |
| | GCAUUU | | *RmG*SmG*RmC*RmA*SmU*S | | | | |
| | CU | | mU*RmU*RmC*RmU | | | | |
| WV-891 | UCAAGG | 219 | mU*SmC*SmA*SmA*RmG*Rm | 971 | SSSRRSSRSSSR | S3R2S2RS3RS2R2S3; | Dystrophin |
| | AAGAUG | | G*SmA*SmA*RmG*SmA*SmU* | | SSRRSSS | 2′-OMe oligo | |
| | GCAUUU | | SmG*RmG*SmC*SmA*RmU*R | | | | |
| | CU | | mU*SmU*SmC*SmU | | | | |
| WV-892 | UCAAGG | 220 | mU*SmC*RmA*RmA*RmG*Rm | 972 | SRRRRRRRRRR | SR17S; 2′-OMe | Dystrophin |
| | AAGAUG | | G*RmA*RmA*RmG*RmA*RmU | | RRRRRRRS | chimeric oligo | |
| | GCAUUU | | *RmG*RmG*RmC*RmA*RmU* | | | | |
| | CU | | RmU*RmU*RmC*SmU | | | | |
| WV-893 | UCAAGG | 221 | mU*RmC*SmA*SmA*SmG*Sm | 973 | RSSSSSSSSSSSS | RS17R; 2′-OMe | Dystrophin |
| | AAGAUG | | G*SmA*SmA*SmG*SmA*SmU* | | SSSSSR | chimeric oligo | |
| | GCAUUU | | SmG*SmG*SmC*SmA*SmU*Sm | | | | |
| | CU | | U*SmU*SmC*RmU | | | | |
| WV-894 | UCAAGG | 222 | mU*SmC*RmA*SmA*SmG*Rm | 974 | SRSSRRSSRSSR | GC(R) and AU(S) 2′- | Dystrophin |
| | AAGAUG | | G*RmA*SmA*SmG*RmA*SmU | | RRSSSSR | OMe oligo | |
| | GCAUUU | | *SmG*RmG*RmC*RmA*SmU*S | | | | |
| | CU | | mU*SmU*SmC*RmU | | | | |
| WV-895 | UCAAGG | 223 | mU*RmC*SmA*RmA*RmG*Sm | 975 | RSRRSSRRSRR | GC(S) and AU(R) 2′- | Dystrophin |
| | AAGAUG | | G*SmA*RmA*RmG*SmA*RmU | | SSSRRRRS | OMe oligo | |
| | GCAUUU | | *RmG*SmG*SmC*SmA*RmU*R | | | | |
| | CU | | mU*RmU*RmC*SmU | | | | |
| WV-896 | UCAAGG | 224 | mU*SmC*SmA*RmA*RmG*Rm | 976 | SSRRRRRRRRS | GA(R) and CU(S) 2′- | Dystrophin |
| | AAGAUG | | G*RmA*RmA*RmG*RmA*RmU | | RRSRSSSS | OMe oligo | |
| | GCAUUU | | *SmG*RmG*RmC*SmA*RmU*S | | | | |
| | CU | | mU*SmU*SmC*SmU | | | | |
| WV-897 | UCAAGG | 225 | mU*RmC*RmA*SmA*SmG*Sm | 977 | RRSSSSSSSSRS | GA(S) and CU(R) 2′- | Dystrophin |
| | AAGAUG | | G*SmA*SmA*SmG*SmA*SmU* | | SRSRRRR | OMe oligo | |
| | GCAUUU | | RmG*SmG*SmC*RmA*SmU*R | | | | |
| | CU | | mU*RmU*RmC*RmU | | | | |
| WV-1678 | GGCCAA | 226 | fG*fG*fC*fC*fA*fA*fA*fC*fC*f | 978 | XXXXXXXXXX | All 2′-F modified | Exon 23 |
| | ACCUCG | | U*fC*fG*fG*fC*fU*fU*fA*fC*f | | XXXXXXXXX | | |
| | GCUUAC | | C*fU | | | | |
| | CU | | | | | | |
| WV-1679 | GGCCAA | 227 | mG*mG*fC*fC*mA*mA*mA*fC | 979 | XXXXXXXXXX | 2′-F pyrimidines; 2′- | Exon 23 |
| | ACCUCG | | *fC*fU*fC*mG*mG*fC*fU*fU* | | XXXXXXXXX | OMe purines | |
| | GCUUAC | | mA*fC*fC*fU | | | | |
| | CU | | | | | | |
| WV-1680 | GGCCAA | 228 | fG*fG*mC*mC*fA*fA*fA*mC* | 980 | XXXXXXXXXX | 2′-F purines; 2′-OMe | Exon 23 |
| | ACCUCG | | mC*mU*mC*fG*fG*mC*mU*m | | XXXXXXXXX | pyrimidines | |
| | GCUUAC | | U*fA*mC*mC*mU | | | | |
| | CU | | | | | | |
| WV-1681 | GGCCAA | 229 | mG*fG*mC*fC*mA*fA*mA*fC* | 981 | XXXXXXXXXX | Alternate 2′-OMe/2′F | Exon 23 |
| | ACCUCG | | mC*fU*mC*fG*mG*fC*mU*fU* | | XXXXXXXXX | | |
| | GCUUAC | | mA*fC*mC*fU | | | | |
| | CU | | | | | | |
| WV-1682 | GGCCAA | 230 | mG*mG*mC*mC*mA*mA*fA*f | 982 | XXXXXXXXXX | 2′-OMe/2′-F/2′-OMe | Exon 23 |
| | ACCUCG | | C*fC*fU*fC*fG*fG*fC*mU*mU | | XXXXXXXXX | gapmer | |
| | GCUUAC | | *mA*mC*mC*mU | | | | |
| | CU | | | | | | |
| WV-1683 | GGCCAA | 231 | fG*fG*fC*fC*fA*fA*mA*mC*m | 983 | XXXXXXXXXX | 2′-F/2′-OMe/2′-F | Exon 23 |
| | ACCUCG | | C*mU*mC*mG*mG*mC*fU*fU | | XXXXXXXXX | gapmer | |
| | GCUUAC | | *fA*fC*fC*fU | | | | |
| | CU | | | | | | |
| WV-1684 | GGCCAA | 232 | fG*fG*fC*fC*mA*mA*mA*fC*f | 984 | XXXXXXXXXX | 2′-F (C; G); 2′-OMe | Exon 23 |
| | ACCUCG | | C*mU*fC*fG*fG*fC*mU*mU*m | | XXXXXXXXX | (U; A) | |
| | GCUUAC | | A*fC*fC*mU | | | | |
| | CU | | | | | | |
| WV-1685 | GGCCAA | 233 | mG*mG*mC*mC*fA*fA*fA*mC | 985 | XXXXXXXXXX | 2′-F (U; A); 2′-OMe | Exon 23 |
| | ACCUCG | | *mC*fU*mC*mG*mG*mC*fU*f | | XXXXXXXXX | (C; G) | |
| | GCUUAC | | U*fA*mC*mC*fU | | | | |
| | CU | | | | | | |
| WV-1709 | UCAAGG | 234 | fU*fC*fA*fA*fG*fG*fA*fA*fG* | 986 | XXXXXXXXXX | | Exon 51 |
| | AAGAUG | | fA*fU*fG*fG*fC*fA*fU*fU*fU* | | XXXXXXXXX | | |
| | GCAUUU | | fC*fU | | | | |
| | CU | | | | | | |
| WV-1710 | UCAAGG | 235 | fU*fC*mA*mA*mG*mG*mA*m | 987 | XXXXXXXXXX | | Exon 51 |
| | AAGAUG | | A*mG*mA*fU*mG*mG*fC*mA | | XXXXXXXXX | | |
| | GCAUUU | | *fU*fU*fU*fC*fU | | | | |
| | CU | | | | | | |
| WV-1711 | UCAAGG | 236 | mU*mC*fA*fA*fG*fG*fA*fA*f | 988 | XXXXXXXXXX | | Exon 51 |
| | AAGAUG | | G*fA*mU*fG*fG*mC*fA*mU* | | XXXXXXXXX | | |
| | GCAUUU | | mU*mU*mC*mU | | | | |
| | CU | | | | | | |
| WV-1712 | UCAAGG | 237 | mU*fC*mA*fA*mG*fG*mA*fA | 989 | XXXXXXXXXX | | Exon 51 |
| | AAGAUG | | *mG*fA*mU*fG*mG*fC*mA*f | | XXXXXXXXX | | |
| | GCAUUU | | U*mU*fU*mC*fU | | | | |
| | CU | | | | | | |
| WV-1713 | UCAAGG | 238 | mU*mC*mA*mA*mG*mG*fA*f | 990 | XXXXXXXXXX | | Exon 51 |
| | AAGAUG | | A*fG*fA*fU*fG*fG*fC*mA*mU | | XXXXXXXXX | | |
| | GCAUUU | | *mU*mU*mC*mU | | | | |
| | CU | | | | | | |
| WV-1714 | UCAAGG | 239 | fU*fC*fA*fA*fG*fG*mA*mA*m | 991 | XXXXXXXXXX | | Exon 51 |
| | AAGAUG | | G*mA*mU*mG*mG*mC*fA*fU | | XXXXXXXXX | | |
| | GCAUUU | | *fU*fU*fC*fU | | | | |
| | CU | | | | | | |
| WV-1715 | UCAAGG | 240 | mU*fC*mA*mA*fG*fG*mA*mA | 992 | XXXXXXXXXX | | Exon 51 |
| | AAGAUG | | *fG*mA*mU*fG*fG*fC*mA*m | | XXXXXXXXX | | |
| | GCAUUU | | U*mU*mU*fC*mU | | | | |
| | CU | | | | | | |
| WV-1716 | UCAAGG | 241 | fU*mC*fA*fA*mG*mG*fA*fA* | 993 | XXXXXXXXXX | | Exon 51 |
| | AAGAUG | | mG*fA*fU*mG*mG*mC*fA*fU | | XXXXXXXXX | | |
| | GCAUUU | | *fU*fU*mC*fU | | | | |
| | CU | | | | | | |
| WV-1093 | GGCCAA | 242 | G*G*C*C*A*A*A*C*C*T*C*G | 994 | XXXXXXXXXX | Stereorandom DNA | Exon23 |
| | ACCTCG | | *G*C*T*T*A*C*C*T | | XXXXXXXXX | version of Exon23 full | |
| | GCTTAC | | | | | PS: Analog of WV943 | |
| | CT | | | | | | |
| WV-1094 | GGCCAA | 243 | mGmGmCmCmAmAmAmCmCm | 995 | OOOOOOOOOO | Full PO version of | Exon23 |
| | ACCUCG | | UmCmGmGmCmUmUmAmCmC | | OOOOOOOOO | WV943 | |
| | GCUUAC | | mU | | | | |
| | CU | | | | | | |
| WV-1095 | GGCCAA | 244 | G*RG*RC*RC*RA*RA*RA*RC | 996 | RRRRRRRRRRR | Full Rp DNA version | Exon23 |
| | ACCTCG | | *RC*RT*RC*RG*RG*RC*RT*R | | RRRRRRRR | of Exon23: Analog of | |
| | GCTTAC | | T*RA*RC*RC*RT | | | WV943 | |
| | CT | | | | | | |
| WV-1096 | GGCCAA | 245 | G*SG*SC*SC*SA*SA*SA*SC*S | 997 | SSSSSSSSSSSSS | Full Sp DNA version | Exon23 |
| | ACCTCG | | C*ST*SC*SG*SG*SC*ST*ST*S | | SSSSSS | of Exon23: Analog of | |
| | GCTTAC | | A*SC*SC*ST | | | WV943 | |
| | CT | | | | | | |
| WV-1097 | GGCCAA | 246 | G*SG*SC*SC*SA*SmAmAmCm | 998 | SSSSSOOOOOO | Stereopure | Exon23 |
| | ACCUCG | | CmUmCmGmGmCT*ST*SA*SC | | OOOSSSSS | DNA/2′OMe chimeric | |
| | GCTTAC | | *SC*ST | | | version of Exon23: | |
| | CT | | | | | Analog of 943 | |
| WV-1098 | GGCCAA | 247 | mGmGmCmCA*SA*SA*SmCC* | 999 | OOOOSSSOSSS | Stereopure | Exon23 |
| | ACCTCG | | ST*SC*SG*SmGC*ST*ST*SmA | | SOSSSOOO | DNA/2′OMe chimeric | |
| | GCTTAC | | mCmCmU | | | version of Exon23: | |
| | CU | | | | | Analog of 943 | |
| WV-1099 | GGCCAA | 248 | G*SmGC*SmCA*SmAA*SmCC* | 1000 | SOSOSOSOSOS | Stereopure | Exon23 |
| | ACCUCG | | SmUC*SmGG*SmCT*SmUA*S | | OSOSOSOS | DNA/2′OMe chimeric | |
| | GCTUAC | | mCC*SmU | | | version of Exon23: | |
| | CU | | | | | Analog of 943 | |
| WV-1100 | GGCCAA | 249 | mGG*SmCC*SmAA*SmAC*Sm | 1001 | OSOSOSOSOSO | Stereopure | Exon23 |
| | ACCTCG | | CT*SmCG*SmGC*SmUT*SmAC | | SOSOSOSO | DNA/2′OMe chimeric | |
| | GCUTAC | | *SmCmU | | | version of Exon23: | |
| | CU | | | | | Analog of 943 | |
| WV-1101 | GGCCAA | 250 | G*SG*SmCmCA*SA*SmAmCC* | 1002 | SSOOSSOOSSS | Stereopure | Exon23 |
| | ACCTCG | | ST*SC*SmGmGC*ST*SmUmAC | | OOSSOOSS | DNA/2′OMe chimeric | |
| | GCTUAC | | *SC*SmU | | | version of Exon23: | |
| | CU | | | | | Analog of 943 | |
| WV-1102 | GGCCAA | 251 | G*SG*SC*SmCmAmAA*SC*Sm | 1003 | SSSOOOSSOOO | Stereopure | Exon23 |
| | ACCUCG | | CmUmCG*SG*SmCmUmUA*SC | | SSOOOSSS | DNA/2′OMe chimeric | |
| | GCUUAC | | *SC*SmU | | | version of Exon23: | |
| | CU | | | | | Analog of 943 | |
| WV-1103 | GGCCAA | 252 | G*SG*SC*SC*SmAmAmAmCC* | 1004 | SSSSOOOOSSS | Stereopure | Exon23 |
| | ACCTCG | | ST*SC*SmGmGmCmUT*SA*SC | | OOOOSSSS | DNA/2′OMe chimeric | |
| | GCUTAC | | *SC*SmU | | | version of Exon23: | |
| | CU | | | | | Analog of 943 | |
| WV-1104 | GGCCAA | 253 | G*SG*SC*SmCA*SA*SA*SmC | 1005 | SSSOSSSOSSSO | Stereopure | Exon23 |
| | ACCTCG | | C*ST*SC*SmGG*SC*ST*SmUA | | SSSOSSS | DNA/2′OMe chimeric | |
| | GCTUAC | | *SC*SC*SmU | | | version of Exon23: | |
| | CU | | | | | Analog of 943 | |
| WV-1105 | GGCCAA | 254 | mGmGmCmCA*SA*SA*SC*SC* | 1006 | OOOOSSSSSOO | Stereopure | Exon23 |
| | ACCUCG | | SmUmCmGmGmCT*ST*SA*SC | | OOOSSSSS | DNA/2′OMe chimeric | |
| | GCTTAC | | *SC*SmU | | | version of Exon23: | |
| | CU | | | | | Analog of 943 | |
| WV-1121 | GGCCAA | 255 | G*G*C*C*A*mAmAmCmCmU | 1007 | XXXXXOOOOO | Stereorandom | Exon23 |
| | ACCUCG | | mCmGmGmCT*T*A*C*C*T | | OOOOXXXXX | DNA/2′OMe chimeric | |
| | GCTTAC | | | | | version of Exon23: | |
| | CT | | | | | Analog of WV1097 | |
| WV-1122 | GGCCAA | 256 | mGmGmCmCA*A*A*mCC*T*C | 1008 | OOOOXXXOXX | Stereorandom | Exon23 |
| | ACCTCG | | *G*mGC*T*T*mAmCmCmU | | XXOXXXOOO | DNA/2′OMe chimeric | |
| | GCTTAC | | | | | version of Exon23: | |
| | CU | | | | | Analog of WV1098 | |
| WV-1123 | GGCCAA | 257 | G*mGC*mCA*mAA*mCC*mUC | 1009 | XOXOXOXOXO | Stereorandom | Exon23 |
| | ACCUCG | | *mGG*mCT*mUA*mCC*mU | | XOXOXOXOX | DNA/2′OMe chimeric | |
| | GCTUAC | | | | | version of Exon23: | |
| | CU | | | | | Analog of WV1099 | |
| WV-1124 | GGCCAA | 258 | mGG*mCC*mAA*mAC*mCT*m | 1010 | OXOXOXOXOX | Stereorandom | Exon23 |
| | ACCTCG | | CG*mGC*mUT*mAC*mCmU | | OXOXOXOXO | DNA/2′OMe chimeric | |
| | GCUTAC | | | | | version of Exon23: | |
| | CU | | | | | Analog of WV1100 | |
| WV-1125 | GGCCAA | 259 | G*G*mCmCA*A*mAmCmCT*C | 1011 | XXOOXXOOOX | Stereorandom | Exon23 |
| | ACCTCG | | *mGmGC*T*mUmAC*C*mU | | XOOXXOOXX | DNA/2′OMe chimeric | |
| | GCTUAC | | | | | version of Exon23: | |
| | CU | | | | | Analog of WV1101 | |
| WV-1126 | GGCCAA | 260 | G*G*C*mCmAmAA*C*mCmU | 1012 | XXXOOOXXOO | Stereorandom | Exon23 |
| | ACCUCG | | mCG*G*mCmUmUA*C*C*mU | | OXXOOOXXX | DNA/2′OMe chimeric | |
| | GCUUAC | | | | | version of Exon23: | |
| | CU | | | | | Analog of WV1102 | |
| WV-1127 | GGCCAA | 261 | G*G*C*C*mAmAmAmCC*T*C | 1013 | XXXXOOOOXX | Stereorandom | Exon23 |
| | ACCTCG | | *mGmGmCmUT*A*C*C*mU | | XOOOOXXXX | DNA/2′OMe chimeric | |
| | GCUTAC | | | | | version of Exon23: | |
| | CU | | | | | Analog of WV1103 | |
| WV-1128 | GGCCAA | 262 | G*G*C*mCA*A*A*mCC*T*C* | 1014 | XXXOXXXOXX | Stereorandom | Exon23 |
| | ACCTCG | | mGG*C*T*mUA*C*C*mU | | XOXXXOXXX | DNA/2′OMe chimeric | |
| | GCTUAC | | | | | version of Exon23: | |
| | CU | | | | | Analog of WV1104 | |
| WV-1129 | GGCCAA | 263 | mGmGmCmCA*A*A*C*C*mU | 1015 | OOOOXXXXXO | Stereorandom | Exon23 |
| | ACCUCG | | mCmGmGmCT*T*A*C*C*mU | | OOOOXXXXX | DNA/2′OMe chimeric | |
| | GCTTAC | | | | | version of Exon23: | |
| | CU | | | | | Analog of WV1105 | |
| WV-1130 | GGCCAA | 264 | G*G*mCmCmAmAmAmCmCm | 1016 | XXOOOOOOOO | Stereorandom | Exon23 |
| | ACCUCG | | UC*mGmGC*mUT*A*C*C*mU | | XOOXOXXXX | DNA/2′OMe chimeric | |
| | GCUTAC | | | | | version of Exon23: | |
| | CU | | | | | Analog of WV1106 | |
| WV-1141 | GGCCAA | 265 | mG*mG*mC*mC*mA*mAmAm | 1017 | XXXXXOOOOO | Stereorandom 2′OMe | Exon23 |
| | ACCUCG | | CmCmUmCmGmGmCmU*mU* | | OOOOXXXXX | PO/PS chimeric | |
| | GCUUAC | | mA*mC*mC*mU | | | version of exon23: | |
| | CU | | | | | Analog of WV1097 | |
| WV-1142 | GGCCAA | 266 | mGmGmCmCmA*mA*mA*mCm | 1018 | OOOOXXXOXX | Stereorandom 2′OMe | Exon23 |
| | ACCUCG | | C*mU*mC*mG*mGmC*mU*mU | | XXOXXXOOO | PO/PS chimeric | |
| | GCUUAC | | *mAmCmCmU | | | version of exon23: | |
| | CU | | | | | Analog of WV1098 | |
| WV-1143 | GGCCAA | 267 | mG*mGmC*mCmA*mAmA*mC | 1019 | XOXOXOXOXO | Stereorandom 2′OMe | Exon23 |
| | ACCUCG | | mC*mUmC*mGmG*mCmU*mU | | XOXOXOXOX | PO/PS chimeric | |
| | GCUUAC | | mA*mCmC*mU | | | version of exon23: | |
| | CU | | | | | Analog of WV1099 | |
| WV-1144 | GGCCAA | 268 | mGmG*mCmC*mAmA*mAmC* | 1020 | OXOXOXOXOX | Stereorandom 2′OMe | Exon23 |
| | ACCUCG | | mCmU*mCmG*mGmC*mUmU* | | OXOXOXOXO | PO/PS chimeric | |
| | GCUUAC | | mAmC*mCmU | | | version of exon23: | |
| | CU | | | | | Analog of WV1100 | |
| WV-1145 | GGCCAA | 269 | mG*mG*mCmCmA*mA*mAmC | 1021 | XXOOXXOOOX | Stereorandom 2′OMe | Exon23 |
| | ACCUCG | | mCmU*mC*mGmGmC*mU*mU | | XOOXXOOXX | PO/PS chimeric | |
| | GCUUAC | | mAmC*mC*mU | | | version of exon23: | |
| | CU | | | | | Analog of WV1101 | |
| WV-1146 | GGCCAA | 270 | mG*mG*mC*mCmAmAmA*mC | 1022 | XXXOOOXXOO | Stereorandom 2′OMe | Exon23 |
| | ACCUCG | | *mCmUmCmG*mG*mCmUmUm | | OXXOOOXXX | PO/PS chimeric | |
| | GCUUAC | | A*mC*mC*mU | | | version of exon23: | |
| | CU | | | | | Analog of WV1102 | |
| WV-1147 | GGCCAA | 271 | mG*mG*mC*mC*mAmAmAmC | 1023 | XXXXOOOOXX | Stereorandom 2′OMe | Exon23 |
| | ACCUCG | | mC*mU*mC*mGmGmCmUmU* | | XOOOOXXXX | PO/PS chimeric | |
| | GCUUAC | | mA*mC*mC*mU | | | version of exon23: | |
| | CU | | | | | Analog of WV1103 | |
| WV-1148 | GGCCAA | 272 | mG*mG*mC*mCmA*mA*mA* | 1024 | XXXOXXXOXX | Stereorandom 2′OMe | Exon23 |
| | ACCUCG | | mCmC*mU*mC*mGmG*mC*m | | XOXXXOXXX | PO/PS chimeric | |
| | GCUUAC | | U*mUmA*mC*mC*mU | | | version of exon23: | |
| | CU | | | | | Analog of WV1104 | |
| WV-1149 | GGCCAA | 273 | mGmGmCmCmA*mA*mA*mC* | 1025 | OOOOXXXXXO | Stereorandom 2′OMe | Exon23 |
| | ACCUCG | | mC*mUmCmGmGmCmU*mU*m | | OOOOXXXXX | PO/PS chimeric | |
| | GCUUAC | | A*mC*mC*mU | | | version of exon23: | |
| | CU | | | | | Analog of WV1105 | |
| WV-1150 | GGCCAA | 274 | mG*mG*mCmCmAmAmAmCm | 1026 | XXOOOOOOOO | Stereorandom 2′OMe | Exon23 |
| | ACCUCG | | CmUmC*mGmGmC*mUmU*mA | | XOOXOXXXX | PO/PS chimeric | |
| | GCUUAC | | *mC*mC*mU | | | version of exon23: | |
| | CU | | | | | Analog of WV1106 | |
| WV-2733 | GGCCAA | 275 | L001*mG*mG*mC*mC*mA*mA | 1027 | XXXXXXXXXX | All-OMe full-PS | Exon23 |
| | ACCUCG | | *mA*mC*mC*mU*mC*mG*mG | | XXXXXXXXXX | | |
| | GCUUAC | | *mC*mU*mU*mA*mC*mC*mU | | | | |
| | CU | | | | | | |
| WV-2734 | GGCCAA | 276 | L001*mG*mG*mC*mC*mA*mA | 1028 | XXXXXXXXXX | All-OMe full-PS | Exon23 |
| | ACCUCG | | *mA*mC*mC*mU*mC*mG*mG | | XXXXXXXXXX | | |
| | GCUUAC | | *mC*mU*mU*mA*mC*mC*mU | | XXXXX | | |
| | CUGAAA | | *mG*mA*mA*mA*mU | | | | |
| | U | | | | | | |
| WV-1106 | GGCCAA | 277 | G*SG*SmCmCmAmAmAmCmC | 1029 | SSOOOOOOOO | Stereopure | Exon51 |
| | ACCUCG | | mUC*SmGmGC*SmUT*SA*SC* | | SOOSOSSSS | DNA/2′OMe chimeric | |
| | GCUTAC | | SC*SmU | | | version of Exon23: | |
| | CU | | | | | Analog of 943 | |
| WV-1107 | TCAAGG | 278 | T*C*A*A*G*G*A*A*G*A*T*G | 1030 | XXXXXXXXXX | Stereorandom DNA | Exon51 |
| | AAGATG | | *G*C*A*T*T*T*C*T | | XXXXXXXXX | version of Exon51 full | |
| | GCATTT | | | | | PS: Analog of WV942 | |
| | CT | | | | | | |
| WV-1108 | UCAAGG | 279 | mUmCmAmAmGmGmAmAmG | 1031 | OOOOOOOOOO | Full PO version of | Exon51 |
| | AAGAUG | | mAmUmGmGmCmAmUmUmU | | OOOOOOOOO | WV942 | |
| | GCAUUU | | mCmU | | | | |
| | CU | | | | | | |
| WV-1109 | TCAAGG | 280 | T*RC*RA*RA*RG*RG*RA*RA | 1032 | RRRRRRRRRRR | Full Rp DNA version | Exon51 |
| | AAGATG | | *RG*RA*RT*RG*RG*RC*RA* | | RRRRRRRR | of Exon51: Analog of | |
| | GCATTT | | RT*RT*RT*RC*RT | | | WV942 | |
| | CT | | | | | | |
| WV-1110 | TCAAGG | 281 | T*SC*SA*SA*SG*SG*SA*SA*S | 1033 | SSSSSSSSSSSSS | Full Rp DNA version | Exon51 |
| | AAGATG | | G*SA*ST*SG*SG*SC*SA*ST*S | | SSSSSS | of Exon51: Analog of | |
| | GCATTT | | T*ST*SC*ST | | | WV942 | |
| | CT | | | | | | |
| WV-1111 | TCAAGG | 282 | T*SC*SA*SA*SG*SmGmAmAm | 1034 | SSSSSOOOOOO | Stereopure | Exon51 |
| | AAGAUG | | GmAmUmGmGmCA*ST*ST*ST | | OOOSSSSS | DNA/2′OMe chimeric | |
| | GCATTT | | *SC*ST | | | version of Exon51: | |
| | CT | | | | | Analog of 942 | |
| WV-1112 | UCAAGG | 283 | mUmCmAmAG*SG*SA*SmAG* | 1035 | OOOOSSSOSSS | Stereopure | Exon51 |
| | AAGATG | | SA*ST*SG*SmGC*SA*ST*SmU | | SOSSSOOO | DNA/2′OMe chimeric | |
| | GCATUU | | mUmCmU | | | version of Exon51: | |
| | CU | | | | | Analog of 942 | |
| WV-1113 | TCAAGG | 284 | T*SmCA*SmAG*SmGA*SmAG | 1036 | SOSOSOSOSOS | Stereopure | Exon51 |
| | AAGATG | | *SmAT*SmGG*SmCA*SmUT*S | | OSOSOSOS | DNA/2′OMe chimeric | |
| | GCAUTU | | mUC*SmU | | | version of Exon51: | |
| | CU | | | | | Analog of 942 | |
| WV-1114 | UCAAGG | 285 | mUC*SmAA*SmGG*SmAA*Sm | 1037 | OSOSOSOSOSO | Stereopure | Exon51 |
| | AAGAUG | | GA*SmUG*SmGC*SmAT*SmU | | SOSOSOSO | DNA/2′OMe chimeric | |
| | GCATUT | | T*SmCmU | | | version of Exon51: | |
| | CU | | | | | Analog of 942 | |
| WV-1115 | TCAAGG | 286 | T*SC*SmAmAG*SG*SmAmAG | 1038 | SSOOSSOOSSS | Stereopure | Exon51 |
| | AAGATG | | *SA*ST*SmGmGC*SA*SmUmU | | OOSSOOSS | DNA/2′OMe chimeric | |
| | GCAUUT | | T*SC*SmU | | | version of Exon51: | |
| | CU | | | | | Analog of 942 | |
| WV-1116 | TCAAGG | 287 | T*SC*SA*SmAmGmGA*SA*Sm | 1039 | SSSOOOSSOOO | Stereopure | Exon51 |
| | AAGAUG | | GmAmUG*SG*SmCmAmUT*ST | | SSOOOSSS | DNA/2′OMe chimeric | |
| | GCAUTT | | *SC*SmU | | | version of Exon51: | |
| | CU | | | | | Analog of 942 | |
| WV-1117 | TCAAGG | 288 | T*SC*SA*SA*SmGmGmAmAG | 1040 | SSSSOOOOSSS | Stereopure | Exon51 |
| | AAGATG | | *SA*ST*SmGmGmCmAT*ST*S | | OOOOSSSS | DNA/2′OMe chimeric | |
| | GCATTT | | T*SC*SmU | | | version of Exon51: | |
| | CU | | | | | Analog of 942 | |
| WV-1118 | TCAAGG | 289 | T*SC*SA*SmAG*SG*SA*SmA | 1041 | SSSOSSSOSSSO | Stereopure | Exon51 |
| | AAGATG | | G*SA*ST*SmGG*SC*SA*SmUT | | SSSOSSS | DNA/2′OMe chimeric | |
| | GCAUTT | | *ST*SC*SmU | | | version of Exon51: | |
| | CU | | | | | Analog of 942 | |
| WV-1119 | UCAAGG | 290 | mUmCmAmAG*SG*SA*SA*SG | 1042 | OOOOSSSSSOO | Stereopure | Exon51 |
| | AAGAUG | | *SmAmUmGmGmCA*ST*ST*S | | OOOSSSSS | DNA/2′OMe chimeric | |
| | GCATTT | | T*SC*SmU | | | version of Exon51: | |
| | CU | | | | | Analog of 942 | |
| WV-1120 | TCAAGG | 291 | T*SC*SmAmAmGmGmAmAmG | 1043 | SSOOOOOOOO | Stereopure | Exon51 |
| | AAGATG | | mAT*SmGmGC*SmAT*ST*ST* | | SOOSOSSSS | DNA/2′OMe chimeric | |
| | GCATTT | | SC*SmU | | | version of Exon51: | |
| | CU | | | | | Analog of 942 | |
| WV-1131 | TCAAGG | 292 | T*C*A*A*G*mGmAmAmGmA | 1044 | XXXXXOOOOO | Stereorandom | Exon51 |
| | AAGAUG | | mUmGmGmCA*T*T*T*C*T | | OOOOXXXXX | DNA/2′OMe chimeric | |
| | GCATTT | | | | | version of Exon51: | |
| | CT | | | | | Analog of WV1111 | |
| WV-1132 | UCAAGG | 293 | mUmCmAmAG*G*A*mAG*A* | 1045 | OOOOXXXOXX | Stereorandom | Exon51 |
| | AAGATG | | T*G*mGC*A*T*mUmUmCmU | | XXOXXXOOO | DNA/2′OMe chimeric | |
| | GCATUU | | | | | version of Exon51: | |
| | CU | | | | | Analog of WV1112 | |
| WV-1133 | TCAAGG | 294 | T*mCA*mAG*mGA*mAG*mAT | 1046 | XOXOXOXOXO | Stereorandom | Exon51 |
| | AAGATG | | *mGG*mCA*mUT*mUC*mU | | XOXOXOXOX | DNA/2′OMe chimeric | |
| | GCAUTU | | | | | version of Exon51: | |
| | CU | | | | | Analog of WV1113 | |
| WV-1134 | UCAAGG | 295 | mUC*mAA*mGG*mAA*mGA* | 1047 | OXOXOXOXOX | Stereorandom | Exon51 |
| | AAGAUG | | mUG*mGC*mAT*mUT*mCmU | | OXOXOXOXO | DNA/2′OMe chimeric | |
| | GCATUT | | | | | version of Exon51: | |
| | CU | | | | | Analog of WV1114 | |
| WV-1135 | TCAAGG | 296 | T*C*mAmAG*G*mAmAG*A*T | 1048 | XXOOXXOOXX | Stereorandom | Exon51 |
| | AAGATG | | *mGmGC*A*mUmUT*C*mU | | XOOXXOOXX | DNA/2′OMe chimeric | |
| | GCAUUT | | | | | version of Exon51: | |
| | CU | | | | | Analog of WV1115 | |
| WV-1136 | TCAAGG | 297 | T*C*A*mAmGmGA*A*mGmA | 1049 | XXXOOOXXOO | Stereorandom | Exon51 |
| | AAGAUG | | mUG*G*mCmAmUT*T*C*mU | | OXXOOOXXX | DNA/2′OMe chimeric | |
| | GCAUTT | | | | | version of Exon51: | |
| | CU | | | | | Analog of WV1116 | |
| WV-1137 | TCAAGG | 298 | T*C*A*A*mGmGmAmAG*A*T | 1050 | XXXXOOOOXX | Stereorandom | Exon51 |
| | AAGATG | | *mGmGmCmAT*T*T*C*mU | | XOOOOXXXX | DNA/2′OMe chimeric | |
| | GCATTT | | | | | version of Exon51: | |
| | CU | | | | | Analog of WV1117 | |
| WV-1138 | TCAAGG | 299 | T*C*A*mAG*G*A*mAG*A*T* | 1051 | XXXOXXXOXX | Stereorandom | Exon51 |
| | AAGATG | | mGG*C*A*mUT*T*C*mU | | XOXXXOXXX | DNA/2′OMe chimeric | |
| | GCAUTT | | | | | version of Exon51: | |
| | CU | | | | | Analog of WV1118 | |
| WV-1139 | UCAAGG | 300 | mUmCmAmAG*G*A*A*G*mA | 1052 | OOOOXXXXXO | Stereorandom | Exon51 |
| | AAGAUG | | mUmGmGmCA*T*T*T*C*mU | | OOOOXXXXX | DNA/2′OMe chimeric | |
| | GCATTT | | | | | version of Exon51: | |
| | CU | | | | | Analog of WV1119 | |
| WV-1140 | TCAAGG | 301 | T*C*mAmAmGmGmAmAmGm | 1053 | XXOOOOOOOO | Stereorandom | Exon51 |
| | AAGATG | | AT*mGmGC*mAT*T*T*C*mU | | XOOXOXXXX | DNA/2′OMe chimeric | |
| | GCATTT | | | | | version of Exon51: | |
| | CU | | | | | Analog of WV1120 | |
| WV-1151 | UCAAGG | 302 | mU*mC*mA*mA*mG*mGmAm | 1054 | XXXXXOOOOO | Stereorandom 2′OMe | Exon51 |
| | AAGAUG | | AmGmAmUmGmGmCmA*mU* | | OOOOXXXXX | PO/PS chimeric | |
| | GCAUUU | | mU*mU*mC*mU | | | version of exon51: | |
| | CU | | | | | Analog of WV1111 | |
| WV-1152 | UCAAGG | 303 | mUmCmAmAmG*mG*mA*mA | 1055 | OOOOXXXOXX | Stereorandom 2′OMe | Exon51 |
| | AAGAUG | | mG*mA*mU*mG*mGmC*mA* | | XXOXXXOOO | PO/PS chimeric | |
| | GCAUUU | | mU*mUmUmCmU | | | version of exon51: | |
| | CU | | | | | Analog of WV1112 | |
| WV-1153 | UCAAGG | 304 | mU*mCmA*mAmG*mGmA*mA | 1056 | XOXOXOXOXO | Stereorandom 2′OMe | Exon51 |
| | AAGAUG | | mG*mAmU*mGmG*mCmA*mU | | XOXOXOXOX | PO/PS chimeric | |
| | GCAUUU | | mU*mUmC*mU | | | version of exon51: | |
| | CU | | | | | Analog of WV1113 | |
| WV-1154 | UCAAGG | 305 | mUmC*mAmA*mGmG*mAmA* | 1057 | OXOXOXOXOX | Stereorandom 2′OMe | Exon51 |
| | AAGAUG | | mGmA*mUmG*mGmC*mAmU* | | OXOXOXOXO | PO/PS chimeric | |
| | GCAUUU | | mUmU*mCmU | | | version of exon51: | |
| | CU | | | | | Analog of WV1114 | |
| WV-1155 | UCAAGG | 306 | mU*mC*mAmAmG*mG*mAmA | 1058 | XXOOXXOOXX | Stereorandom 2′OMe | Exon51 |
| | AAGAUG | | mG*mA*mU*mGmGmC*mA*m | | XOOXXOOXX | PO/PS chimeric | |
| | GCAUUU | | UmUmU*mC*mU | | | version of exon51: | |
| | CU | | | | | Analog of WV1115 | |
| WV-1156 | UCAAGG | 307 | mU*mC*mA*mAmGmGmA*mA | 1059 | XXXOOOXXOO | Stereorandom 2′OMe | Exon51 |
| | AAGAUG | | *mGmAmUmG*mG*mCmAmU | | OXXOOOXXX | PO/PS chimeric | |
| | GCAUUU | | mU*mU*mC*mU | | | version of exon51: | |
| | CU | | | | | Analog of WV1116 | |
| WV-1157 | UCAAGG | 308 | mU*mC*mA*mA*mGmGmAmA | 1060 | XXXXOOOOXX | Stereorandom 2′OMe | Exon51 |
| | AAGAUG | | mG*mA*mU*mGmGmCmAmU* | | XOOOOXXXX | PO/PS chimeric | |
| | GCAUUU | | mU*mU*mC*mU | | | version of exon51: | |
| | CU | | | | | Analog of WV1117 | |
| WV-1158 | UCAAGG | 309 | mU*mC*mA*mAmG*mG*mA* | 1061 | XXXOXXXOXX | Stereorandom 2′OMe | Exon51 |
| | AAGAUG | | mAmG*mA*mU*mGmG*mC*m | | XOXXXOXXX | PO/PS chimeric | |
| | GCAUUU | | A*mUmU*mU*mC*mU | | | version of exon51: | |
| | CU | | | | | Analog of WV1118 | |
| WV-1159 | UCAAGG | 310 | mUmCmAmAmG*mG*mA*mA* | 1062 | OOOOXXXXXO | Stereorandom 2′OMe | Exon51 |
| | AAGAUG | | mG*mAmUmGmGmCmA*mU* | | OOOOXXXXX | PO/PS chimeric | |
| | GCAUUU | | mU*mU*mC*mU | | | version of exon51: | |
| | CU | | | | | Analog of WV1119 | |
| WV-1160 | UCAAGG | 311 | mU*mC*mAmAmGmGmAmAm | 1063 | XXOOOOOOOO | Stereorandom 2′OMe | Exon51 |
| | AAGAUG | | GmAmU*mGmGmC*mAmU*m | | XOOXOXXXX | PO/PS chimeric | |
| | GCAUUU | | U*mU*mC*mU | | | version of exon51: | |
| | CU | | | | | Analog of WV1120 | |
| WV-1687 | AGAAAU | 312 | rArGrArArArUrGrCrCrArUrCrUr | 1064 | OOOOOOOOOO | RNA | Exon51 |
| | GCCAUC | | UrCrCrUrUrGrA | | OOOOOOOOO | | |
| | UUCCUU | | | | | | |
| | GA | | | | | | |
| WV-2363 | UCAAGG | 313 | mU*SmC*SmA*RmA*RmG*Rm | 1065 | SSRRRRRRRRR | Exon51: 2S-15R-2S | Exon51 |
| | AAGAUG | | G*RmA*RmA*RmG*RmA*RmU | | RRRRRRSS | | |
| | GCAUUU | | *RmG*RmG*RmC*RmA*RmU* | | | | |
| | CU | | RmU*RmU*SmC*SmU | | | | |
| WV-2364 | UCAAGG | 314 | mU*SmC*SmA*SmA*SmG*Rm | 1066 | SSSSRRRRRRR | Exon51: 4S-11R-4S | Exon51 |
| | AAGAUG | | G*RmA*RmA*RmG*RmA*RmU | | RRRRSSSS | | |
| | GCAUUU | | *RmG*RmG*RmC*RmA*RmU* | | | | |
| | CU | | SmU*SmU*SmC*SmU | | | | |
| WV-2365 | UCAAGG | 315 | mU*SmC*SmA*SmA*SmG*Sm | 1067 | SSSSSRRRRRR | Exon51: 5S-9R-5S | Exon51 |
| | AAGAUG | | G*RmA*RmA*RmG*RmA*RmU | | RRRSSSSS | | |
| | GCAUUU | | *RmG*RmG*RmC*RmA*SmU* | | | | |
| | CU | | SmU*SmU*SmC*SmU | | | | |
| WV-2366 | UCAAGG | 316 | mU*SmCmAmAmGmGmAmAm | 1068 | SOOOOOOOOO | Exon51: 1S-17PO-1S | Exon51 |
| | AAGAUG | | GmAmUmGmGmCmAmUmUm | | OOOOOOOOS | | |
| | GCAUUU | | UmC*SmU | | | | |
| | CU | | | | | | |
| WV-2367 | UCAAGG | 317 | mU*SmC*SmAmAmGmGmAmA | 1069 | SSOOOOOOOO | Exon51: 2S-15PO-2S | Exon51 |
| | AAGAUG | | mGmAmUmGmGmCmAmUmU | | OOOOOOOSS | | |
| | GCAUUU | | mU*SmC*SmU | | | | |
| | CU | | | | | | |
| WV-2368 | UCAAGG | 318 | mU*SmC*SmA*SmAmGmGmA | 1070 | SSSOOOOOOO | Exon51: 3S-13PO-3S | Exon51 |
| | AAGAUG | | mAmGmAmUmGmGmCmAmU | | OOOOOOSSS | | |
| | GCAUUU | | mU*SmU*SmC*SmU | | | | |
| | CU | | | | | | |
| WV-2369 | UCAAGG | 319 | mU*SmC*SmA*SmA*SmGmGm | 1071 | SSSSOOOOOOO | Exon51: 4S-11PO-4S | Exon51 |
| | AAGAUG | | AmAmGmAmUmGmGmCmAm | | OOOOSSSS | | |
| | GCAUUU | | U*SmU*SmU*SmC*SmU | | | | |
| | CU | | | | | | |
| WV-2370 | UCAAGG | 320 | mU*SmC*SmA*SmA*SmG*Sm | 1072 | SSSSSOOOOOO | Exon51: 5S-9PO-5S | Exon51 |
| | AAGAUG | | GmAmAmGmAmUmGmGmCm | | OOOSSSSS | | |
| | GCAUUU | | A*SmU*SmU*SmU*SmC*SmU | | | | |
| | CU | | | | | | |
| WV-2381 | UCAAGG | 321 | mU*mCmAmAmGmGmAmAmG | 1073 | XOOOOOOOOO | Exon51: 1PS-17PO- | Exon51 |
| | AAGAUG | | mAmUmGmGmCmAmUmUmU | | OOOOOOOOX | 1PS stereorandom | |
| | GCAUUU | | mC*mU | | | | |
| | CU | | | | | | |
| WV-2382 | UCAAGG | 322 | mU*mC*mAmAmGmGmAmAm | 1074 | XXOOOOOOOO | Exon51: 2PS-15PO- | Exon51 |
| | AAGAUG | | GmAmUmGmGmCmAmUmUm | | OOOOOOOXX | 2PS stereorandom | |
| | GCAUUU | | U*mC*mU | | | | |
| | CU | | | | | | |
| WV-2383 | UCAAGG | 323 | mU*mC*mA*mAmGmGmAmA | 1075 | XXXOOOOOOO | Exon51: 3PS-13PO- | Exon51 |
| | AAGAUG | | mGmAmUmGmGmCmAmUmU* | | OOOOOOXXX | 3PS stereorandom | |
| | GCAUUU | | mU*mC*mU | | | | |
| | CU | | | | | | |
| WV-2384 | UCAAGG | 324 | mU*mC*mA*mA*mGmGmAmA | 1076 | XXXXOOOOOO | Exon51: 4PS-11PO- | Exon51 |
| | AAGAUG | | mGmAmUmGmGmCmAmU*mU | | OOOOOXXXX | 4PS stereorandom | |
| | GCAUUU | | *mU*mC*mU | | | | |
| | CU | | | | | | |
| WV-2385 | UCAAGG | 325 | mU*mC*mA*mA*mG*mGmAm | 1077 | XXXXXOOOOO | Exon51: 5PS-9PO-5PS | Exon51 |
| | AAGAUG | | AmGmAmUmGmGmCmA*mU* | | OOOOXXXXX | stereorandom | |
| | GCAUUU | | mU*mU*mC*mU | | | | |
| | CU | | | | | | |
| WV-2432 | UCAAGG | 326 | fU*fC*fA*fA*fG*fG*mAmAmG | 1078 | XXXXXXOOOO | 6F-8OMe-6F 6PS- | Exon51 |
| | AAGAUG | | mAmUmGmGmC*fA*fU*fU*fU | | OOOXXXXXX | 7PO-6PS | |
| | GCAUUU | | *fC*fU | | | | |
| | CU | | | | | | |
| WV-2433 | UCAAGG | 327 | fU*fC*fA*fA*fG*mGmAmAmG | 1079 | XXXXXOOOOO | 5F-10OMe-5F 5PS- | Exon51 |
| | AAGAUG | | mAmUmGmGmCmA*fU*fU*fU* | | OOOOXXXXX | 9PO-5PS | |
| | GCAUUU | | fC*fU | | | | |
| | CU | | | | | | |
| WV-2434 | UCAAGG | 328 | fU*fC*fA*fA*mGmGmAmAmG | 1080 | XXXXOOOOOO | 4F-12OMe-4F 4PS- | Exon51 |
| | AAGAUG | | mAmUmGmGmCmAmU*fU*fU* | | OOOOOXXXX | 11PO-4PS | |
| | GCAUUU | | fC*fU | | | | |
| | CU | | | | | | |
| WV-2435 | UCAAGG | 329 | fU*fC*fA*mAmGmGmAmAmG | 1081 | XXXOOOOOOO | 3F-14OMe-3F 3PS- | Exon51 |
| | AAGAUG | | mAmUmGmGmCmAmUmU*fU* | | OOOOOOXXX | 13PO-3PS | |
| | GCAUUU | | fC*fU | | | | |
| | CU | | | | | | |
| WV-2436 | UCAAGG | 330 | fU*fC*mAmAmGmGmAmAmG | 1082 | XXOOOOOOOO | 2F-16OMe-2F 2PS- | Exon51 |
| | AAGAUG | | mAmUmGmGmCmAmUmUmU* | | OOOOOOOXX | 15PO-2PS | |
| | GCAUUU | | fC*fU | | | | |
| | CU | | | | | | |
| WV-2437 | UCAAGG | 331 | fU*mCmAmAmGmGmAmAmG | 1083 | XOOOOOOOOO | 1F-18OMe-1F 1PS- | Exon51 |
| | AAGAUG | | mAmUmGmGmCmAmUmUmU | | OOOOOOOOX | 17PO-1PS | |
| | GCAUUU | | mC*fU | | | | |
| | CU | | | | | | |
| WV-2438 | UCAAGG | 332 | fU*SfC*SfA*SfA*SfG*SfG*SmA | 1084 | SSSSSSOOOOO | 6F-8OMe-6F 6Sp- | Exon51 |
| | AAGAUG | | mAmGmAmUmGmGmC*SfA*Sf | | OOSSSSSS | 7PO-6Sp | |
| | GCAUUU | | U*SfU*SfU*SfC*SfU | | | | |
| | CU | | | | | | |
| WV-2439 | UCAAGG | 333 | fU*SfC*SfA*SfA*SfG*SmGmA | 1085 | SSSSSOOOOOO | 5F-10OMe-5F 5Sp- | Exon51 |
| | AAGAUG | | mAmGmAmUmGmGmCmA*SfU | | OOOSSSSS | 9PO-5Sp | |
| | GCAUUU | | *SfU*SfU*SfC*SfU | | | | |
| | ICU | | | | | | |
| WV-2440 | UCAAGG | 334 | fU*SfC*SfA*SfA*SmGmGmAm | 1086 | SSSSOOOOOOO | 4F-12OMe-4F 4Sp- | Exon51 |
| | AAGAUG | | AmGmAmUmGmGmCmAmU*Sf | | OOOOSSSS | 11PO-4Sp | |
| | GCAUUU | | U*SfU*SfC*SfU | | | | |
| | CU | | | | | | |
| WV-2441 | UCAAGG | 335 | fU*SfC*SfA*SmAmGmGmAmA | 1087 | SSSOOOOOOO | 3F-14OMe-3F 3Sp- | Exon51 |
| | AAGAUG | | mGmAmUmGmGmCmAmUmU* | | OOOOOOSSS | 13PO-3Sp | |
| | GCAUUU | | SfU*SfC*SfU | | | | |
| | CU | | | | | | |
| WV-2442 | UCAAGG | 336 | fU*SfC*SmAmAmGmGmAmAm | 1088 | SSOOOOOOOO | 2F-16OMe-2F 2Sp- | Exon51 |
| | AAGAUG | | GmAmUmGmGmCmAmUmUm | | OOOOOOOSS | 15PO-2Sp | |
| | GCAUUU | | U*SfC*SfU | | | | |
| | CU | | | | | | |
| WV-2443 | UCAAGG | 337 | fU*SmCmAmAmGmGmAmAmG | 1089 | SOOOOOOOOO | 1F-18OMe-1F 1Sp- | Exon51 |
| | AAGAUG | | mAmUmGmGmCmAmUmUmU | | OOOOOOOOS | 17PO-1Sp | |
| | GCAUUU | | mC*SfU | | | | |
| | CU | | | | | | |
| WV-2444 | UCAAGG | 338 | fU*SfC*SfA*SfA*SfG*SfG*SmA | 1090 | SSSSSSRRRRRR | 6F-8OMe-6F 6Sp- | Exon51 |
| | AAGAUG | | *RmA*RmG*RmA*RmU*RmG* | | RSSSSSS | 7Rp-6Sp | |
| | GCAUUU | | RmG*RmC*SfA*SfU*SfU*SfU* | | | | |
| | CU | | SfC*SfU | | | | |
| WV-2445 | UCAAGG | 339 | fU*SfC*SfA*SfA*SfG*SmG*Rm | 1091 | SSSSSRRRRRR | 5F-10OMe-5F 5Sp- | Exon51 |
| | AAGAUG | | A*RmA*RmG*RmA*RmU*RmG | | RRRSSSSS | 9Rp-5Sp | |
| | GCAUUU | | *RmG*RmC*RmA*SfU*SfU*Sf | | | | |
| | CU | | U*SfC*SfU | | | | |
| WV-2446 | UCAAGG | 340 | fU*SfC*SfA*SfA*SmG*RmG*R | 1092 | SSSSRRRRRRR | 4F-12OMe-4F 4Sp- | Exon51 |
| | AAGAUG | | mA*RmA*RmG*RmA*RmU*Rm | | RRRRSSSS | 11Rp-4Sp | |
| | GCAUUU | | G*RmG*RmC*RmA*RmU*SfU* | | | | |
| | CU | | SfU*SfC*SfU | | | | |
| WV-2447 | UCAAGG | 341 | fU*SfC*SfA*SmA*RmG*RmG* | 1093 | SSSRRRRRRRR | 3F-14OMe-3F 3Sp- | Exon51 |
| | AAGAUG | | RmA*RmA*RmG*RmA*RmU*R | | RRRRRSSS | 13Rp-3Sp | |
| | GCAUUU | | mG*RmG*RmC*RmA*RmU*Rm | | | | |
| | CU | | U*SfU*SfC*SfU | | | | |
| WV-2448 | UCAAGG | 342 | fU*SfC*SmA*RmA*RmG*RmG | 1094 | SSRRRRRRRRR | 2F-16OMe-2F 2Sp- | Exon51 |
| | AAGAUG | | *RmA*RmA*RmG*RmA*RmU* | | RRRRRRSS | 15Rp-2Sp | |
| | GCAUUU | | RmG*RmG*RmC*RmA*RmU*R | | | | |
| | CU | | mU*RmU*SfC*SfU | | | | |
| WV-2449 | UCAAGG | 343 | fU*SmC*RmA*RmA*RmG*Rm | 1095 | SRRRRRRRRRR | 1F-18OMe-1F 1Sp- | Exon51 |
| | AAGAUG | | G*RmA*RmA*RmG*RmA*RmU | | RRRRRRRS | 17Rp-1Sp | |
| | GCAUUU | | *RmG*RmG*RmC*RmA*RmU* | | | | |
| | CU | | RmU*RmU*RmC*SfU | | | | |
| WV-2526 | UCAAGG | 344 | fU*SfC*SfA*SfA*SfG*SfG*SfA | 1096 | SSSSSSSRRRRR | 7F-6OMe-7F 7Sp- | Exon51 |
| | AAGAUG | | *SfA*RmG*RmA*RmU*RmG*R | | SSSSSSS | 5Rp-7Sp | |
| | GCAUUU | | mG*SfC*SfA*SfU*SfU*SfU*SfC | | | | |
| | CU | | *SfU | | | | |
| WV-2527 | UCAAGG | 345 | fU*SfC*SfA*SfA*SfG*SfG*SfA | 1097 | SSSSSSSSRRRS | 8F-4OMe-8F 8Sp- | Exon51 |
| | AAGAUG | | *SfA*SmG*RmA*RmU*RmG*Sf | | SSSSSSS | 3Rp-8Sp | |
| | GCAUUU | | G*SfC*SfA*SfU*SfU*SfU*SfC* | | | | |
| | CU | | SfU | | | | |
| WV-2528 | UCAAGG | 346 | fU*SfC*SfA*SfA*SfG*SfG*SfA | 1098 | SSSSSSSSSRSSS | 9F-2OMe-9F 9Sp- | Exon51 |
| | AAGAUG | | *SfA*SfG*SmA*RmU*SfG*SfG | | SSSSSS | 1Rp-9Sp | |
| | GCAUUU | | *SfC*SfA*SfU*SfU*SfU*SfC*Sf | | | | |
| | CU | | U | | | | |
| WV-2529 | UCAAGG | 347 | fU*SfC*SfA*SfA*SfG*SfG*SfA | 1099 | SSSSSSSOOOO | 7F-6OMe-7F 7Sp- | Exon51 |
| | AAGAUG | | *SfAmGmAmUmGmG*SfC*SfA | | OSSSSSSS | 5PO-7Sp | |
| | GCAUUU | | *SfU*SfU*SfU*SfC*SfU | | | | |
| | CU | | | | | | |
| WV-2530 | UCAAGG | 348 | fU*SfC*SfA*SfA*SfG*SfG*SfA | 1100 | SSSSSSSSOOOS | 8F-4OMe-8F 8Sp- | Exon51 |
| | AAGAUG | | *SfA*SmGmAmUmG*SfG*SfC* | | SSSSSSS | 3PO-8Sp | |
| | GCAUUU | | SfA*SfU*SfU*SfU*SfC*SfU | | | | |
| | CU | | | | | | |
| WV-2531 | UCAAGG | 349 | fU*SfC*SfA*SfA*SfG*SfG*SfA | 1101 | SSSSSSSSSOSSS | 9F-2OMe-9F 9Sp- | Exon51 |
| | AAGAUG | | *SfA*SfG*SmAmU*SfG*SfG*Sf | | SSSSSS | 1PO-9Sp | |
| | GCAUUU | | C*SfA*SfU*SfU*SfU*SfC*SfU | | | | |
| | CU | | | | | | |
| WV-2532 | UCAAGG | 350 | fU*SfC*SfA*SfA*SfG*SfG*SfA | 1102 | SSSSSSXXXXX | 6F-8OMe-6F 6Sp- | Exon51 |
| | AAGAUG | | *mA*mG*mA*mU*mG*mG*fC* | | XXSSSSSS | 7PS-6Sp | |
| | GCAUUU | | SfA*SfU*SfU*SfU*SfC*SfU | | | | |
| | CU | | | | | | |
| WV-2533 | UCAAGG | 351 | mU*SmC*SmA*SmA*SmG*Sm | 1103 | SSSSSSRRRRRR | All-OMe 6Sp-7Rp- | Exon51 |
| | AAGAUG | | G*SmA*RmA*RmG*RmA*RmU | | RSSSSSS | 6Sp | |
| | GCAUUU | | *RmG*RmG*RmC*SmA*SmU*S | | | | |
| | CU | | mU*SmU*SmC*SmU | | | | |
| WV-2534 | UCAAGG | 352 | mU*SmC*SmA*SmA*SmG*Sm | 1104 | SSSSSSSRRRRR | All-OMe 7Sp-5Rp- | Exon51 |
| | AAGAUG | | G*SmA*SmA*RmG*RmA*RmU | | SSSSSSS | 7Sp | |
| | GCAUUU | | *RmG*RmG*SmC*SmA*SmU*S | | | | |
| | CU | | mU*SmU*SmC*SmU | | | | |
| WV-2535 | UCAAGG | 353 | mU*SmC*SmA*SmA*SmG*Sm | 1105 | SSSSSSSSRRRS | All-OMe 8Sp-3Rp- | Exon51 |
| | AAGAUG | | G*SmA*SmA*SmG*RmA*RmU | | SSSSSSS | 8Sp | |
| | GCAUUU | | *RmG*SmG*SmC*SmA*SmU*S | | | | |
| | CU | | mU*SmU*SmC*SmU | | | | |
| WV-2536 | UCAAGG | 354 | mU*SmC*SmA*SmA*SmG*Sm | 1106 | SSSSSSSSSRSSS | All-OMe 9Sp-1Rp- | Exon51 |
| | AAGAUG | | G*SmA*SmA*SmG*SmA*RmU* | | SSSSSS | 9Sp | |
| | GCAUUU | | SmG*SmG*SmC*SmA*SmU*Sm | | | | |
| | CU | | U*SmU*SmC*SmU | | | | |
| WV-2537 | UCAAGG | 355 | mU*SmC*SmA*SmA*SmG*Sm | 1107 | SSSSSSXXXXX | All-OMe 6Sp-7PS-6Sp | Exon51 |
| | AAGAUG | | G*SmA*mA*mG*mA*mU*mG* | | XXSSSSSS | | |
| | GCAUUU | | mG*mC*SmA*SmU*SmU*SmU | | | | |
| | CU | | *SmC*SmU | | | | |
| WV-2538 | UCAAGG | 356 | L001*mU*mC*mA*mA*mG*mG | 1108 | XXXXXXXXXX | Drisapersen with C6 | Exon51 |
| | AAGAUG | | *mA*mA*mG*mA*mU*mG*mG | | XXXXXXXXXX | lamino linker | |
| | GCAUUU | | *mC*mA*mU*mU*mU*mC*mU | | | | |
| | CU | | | | | | |
| WV-2578 | UCAAGG | 357 | Mod013L001*mU*mC*mA*mA* | 1109 | OXXXXXXXXX | Drisapersen with C6 | Exon51 |
| | AAGAUG | | mG*mG*mA*mA*mG*mA*mU* | | XXXXXXXXXX | and Lauric | |
| | GCAUUU | | mG*mG*mC*mA*mU*mU*mU* | | X | | |
| | CU | | mC*mU | | | | |
| WV-2579 | UCAAGG | 358 | Mod014L001*mU*mC*mA*mA* | 1110 | OXXXXXXXXX | Drisapersen with C6 | Exon51 |
| | AAGAUG | | mG*mG*mA*mA*mG*mA*mU* | | XXXXXXXXXX | and Myristic | |
| | GCAUUU | | mG*mG*mC*mA*mU*mU*mU* | | X | | |
| | CU | | mC*mU | | | | |
| WV-2580 | UCAAGG | 359 | Mod005L001*mU*mC*mA*mA* | 1111 | OXXXXXXXXX | Drisapersen with C6 | Exon51 |
| | AAGAUG | | mG*mG*mA*mA*mG*mA*mU* | | XXXXXXXXXX | and Palmitic | |
| | GCAUUU | | mG*mG*mC*mA*mU*mU*mU* | | X | | |
| | CU | | mC*mU | | | | |
| WV-2581 | UCAAGG | 360 | Mod015L001*mU*mC*mA*mA* | 1112 | OXXXXXXXXX | Drisapersen with C6 | Exon51 |
| | AAGAUG | | mG*mG*mA*mA*mG*mA*mU* | | XXXXXXXXXX | and Stearic | |
| | GCAUUU | | mG*mG*mC*mA*mU*mU*mU* | | X | | |
| | CU | | mC*mU | | | | |
| WV-2582 | UCAAGG | 361 | Mod016L001*mU*mC*mA*mA* | 1113 | OXXXXXXXXX | Drisapersen with C6 | Exon51 |
| | AAGAUG | | mG*mG*mA*mA*mG*mA*mU* | | XXXXXXXXXX | and Oleic | |
| | GCAUUU | | mG*mG*mC*mA*mU*mU*mU* | | X | | |
| | CU | | mC*mU | | | | |
| WV-2583 | UCAAGG | 362 | Mod017L001*mU*mC*mA*mA* | 1114 | OXXXXXXXXX | Drisapersen with C6 | Exon51 |
| | AAGAUG | | mG*mG*mA*mA*mG*mA*mU* | | XXXXXXXXXX | and Linoleic | |
| | GCAUUU | | mG*mG*mC*mA*mU*mU*mU* | | X | | |
| | CU | | mC*mU | | | | |
| WV-2584 | UCAAGG | 363 | Mod018L001*mU*mC*mA*mA* | 1115 | OXXXXXXXXX | Drisapersen with C6 | Exon51 |
| | AAGAUG | | mG*mG*mA*mA*mG*mA*mU* | | XXXXXXXXXX | and alpha-Linolenic | |
| | GCAUUU | | mG*mG*mC*mA*mU*mU*mU* | | X | | |
| | CU | | mC*mU | | | | |
| WV-2585 | UCAAGG | 364 | Mod019L001*mU*mC*mA*mA* | 1116 | OXXXXXXXXX | Drisapersen with C6 | Exon51 |
| | AAGAUG | | mG*mG*mA*mA*mG*mA*mU* | | XXXXXXXXXX | and gamma-Linolenic | |
| | GCAUUU | | mG*mG*mC*mA*mU*mU*mU* | | X | | |
| | CU | | mC*mU | | | | |
| WV-2586 | UCAAGG | 365 | Mod006L001*mU*mC*mA*mA* | 1117 | OXXXXXXXXX | Drisapersen with C6 | Exon51 |
| | AAGAUG | | mG*mG*mA*mA*mG*mA*mU* | | XXXXXXXXXX | and DHA | |
| | GCAUUU | | mG*mG*mC*mA*mU*mU*mU* | | X | | |
| | CU | | mC*mU | | | | |
| WV-2587 | UCAAGG | 366 | Mod020L001*mU*mC*mA*mA* | 1118 | OXXXXXXXXX | Drisapersen with C6 | Exon51 |
| | AAGAUG | | mG*mG*mA*mA*mG*mA*mU* | | XXXXXXXXXX | and Turbinaric | |
| | GCAUUU | | mG*mG*mC*mA*mU*mU*mU* | | X | | |
| | CU | | mC*mU | | | | |
| WV-2588 | UCAAGG | 367 | Mod021*mU*mC*mA*mA*mG* | 1119 | XXXXXXXXXX | Drisapersen with C6 | Exon51 |
| | AAGAUG | | mG*mA*mA*mG*mA*mU*mG* | | XXXXXXXXXX | and Dilinoleic | |
| | GCAUUU | | mG*mC*mA*mU*mU*mU*mC* | | | | |
| | CU | | mU | | | | |
| WV-2660 | UCAAGG | 368 | mU*mC*mA*mA*mG*mG*mA | 1120 | XXXXXXOOOO | All-OMe 6PS-7PO- | Exon51 |
| | AAGAUG | | mAmGmAmUmGmGmC*mA*m | | OOOXXXXXX | 6PS | |
| | GCAUUU | | U*mU*mU*mC*mU | | | | |
| | CU | | | | | | |
| WV-2661 | UCAAGG | 369 | mU*mC*mA*mA*mG*mG*mA* | 1121 | XXXXXXXOOO | All-OMe 7PS-5PO- | Exon51 |
| | AAGAUG | | mAmGmAmUmGmG*mC*mA* | | OOXXXXXXX | 7PS | |
| | GCAUUU | | mU*mU*mU*mC*mU | | | | |
| | CU | | | | | | |
| WV-2662 | UCAAGG | 370 | mU*mC*mA*mA*mG*mG*mA* | 1122 | XXXXXXXXOO | All-OMe 8PS-3PO- | Exon51 |
| | AAGAUG | | mA*mGmAmUmG*mG*mC*mA | | OXXXXXXXX | 8PS | |
| | GCAUUU | | *mU*mU*mU*mC*mU | | | | |
| | CU | | | | | | |
| WV-2663 | UCAAGG | 371 | mU*mC*mA*mA*mG*mG*mA* | 1123 | XXXXXXXXXO | All-OMe 9PS-1PO- | Exon51 |
| | AAGAUG | | mA*mG*mAmU*mG*mG*mC* | | XXXXXXXXX | 9PS | |
| | GCAUUU | | mA*mU*mU*mU*mC*mU | | | | |
| | CU | | | | | | |
| WV-2664 | UCAAGG | 372 | mU*SmC*SmA*SmA*SmG*Sm | 1124 | SSSSSSOOOOO | All-OMe 6Sp-7PO- | Exon51 |
| | AAGAUG | | G*SmAmAmGmAmUmGmGmC | | OOSSSSSS | 6Sp | |
| | GCAUUU | | *SmA*SmU*SmU*SmU*SmC*S | | | | |
| | CU | | mU | | | | |
| WV-2665 | UCAAGG | 373 | mU*SmC*SmA*SmA*SmG*Sm | 1125 | SSSSSSSOOOO | All-OMe 7Sp-5PO- | Exon51 |
| | AAGAUG | | G*SmA*SmAmGmAmUmGmG* | | OSSSSSSS | 7Sp | |
| | GCAUUU | | SmC*SmA*SmU*SmU*SmU*Sm | | | | |
| | CU | | C*SmU | | | | |
| WV-2666 | UCAAGG | 374 | mU*SmC*SmA*SmA*SmG*Sm | 1126 | SSSSSSSSOOOS | All-OMe 8Sp-3PO- | Exon51 |
| | AAGAUG | | G*SmA*SmA*SmGmAmUmG*S | | SSSSSSS | 8Sp | |
| | GCAUUU | | mG*SmC*SmA*SmU*SmU*Sm | | | | |
| | CU | | U*SmC*SmU | | | | |
| WV-2667 | UCAAGG | 375 | mU*SmC*SmA*SmA*SmG*Sm | 1127 | SSSSSSSSSOSSS | All-OMe 9Sp-1PO- | Exon51 |
| | AAGAUG | | G*SmA*SmA*SmG*SmAmU*S | | SSSSSS | 9Sp | |
| | GCAUUU | | mG*SmG*SmC*SmA*SmU*Sm | | | | |
| | CU | | U*SmU*SmC*SmU | | | | |
| WV-2668 | UCAAGG | 376 | fU*fC*fA*fA*fG*fG*fA*mAmG | 1128 | XXXXXXXOOO | 7F-6OMe-7F 7PS- | Exon51 |
| | AAGAUG | | mAmUmGmG*fC*fA*fU*fU*fU | | OOXXXXXXX | 5PO-7PS | |
| | GCAUUU | | *fC*fU | | | | |
| | CU | | | | | | |
| WV-2669 | UCAAGG | 377 | fU*fC*fA*fA*fG*fG*fA*fA*mG | 1129 | XXXXXXXXOO | 8F-4OMe-8F 8PS- | Exon51 |
| | AAGAUG | | mAmUmG*fG*fC*fA*fU*fU*fU | | OXXXXXXXX | 3PO-8PS | |
| | GCAUUU | | *fC*fU | | | | |
| | CU | | | | | | |
| WV-2670 | UCAAGG | 378 | fU*fC*fA*fA*fG*fG*fA*fA*fG* | 1130 | XXXXXXXXXO | 9F-2OMe-9F 9PS- | Exon51 |
| | AAGAUG | | mAmU*fG*fG*fC*fA*fU*fU*fU | | XXXXXXXXX | 1PO-9PS | |
| | GCAUUU | | *fC*fU | | | | |
| | CU | | | | | | |
| WV-2737 | UCAAGG | 379 | fU*SfC*SfA*SfA*SfG*SfG*SmA | 1131 | SSSSSSOOORO | | DMD |
| | AAGAUG | | mAmGmA*RmUmGmGmC*SfA | | OOSSSSSS | | |
| | GCAUUU | | *SfU*SfU*SfU*SfC*SfU | | | | |
| | CU | | | | | | |
| WV-2738 | UCAAGG | 380 | fU*SfC*SfA*SfA*SfG*SfG*SmA | 1132 | SSSSSSOORRR | | Exon 51 |
| | AAGAUG | | mAmG*RmA*RmU*RmGmGmC | | OOSSSSSS | | |
| | GCAUUU | | *SfA*SfU*SfU*SfU*SfC*SfU | | | | |
| | CU | | | | | | |
| WV-2739 | UCAAGG | 381 | fU*SfC*SfA*SfA*SfG*SfG*SmA | 1133 | SSSSSSORRRRR | | Exon 51 |
| | AAGAUG | | mA*RmG*RmA*RmU*RmG*Rm | | OSSSSSS | | |
| | GCAUUU | | GmC*SfA*SfU*SfU*SfU*SfC*Sf | | | | |
| | CU | | U | | | | |
| WV-2740 | UCAAGG | 382 | fU*SfC*SfA*SfA*SfG*SfG*SmA | 1134 | SSSSSSRROOO | | Exon 51 |
| | AAGAUG | | *RmA*RmGmAmUmG*RmG*R | | RRSSSSSS | | |
| | GCAUUU | | mC*SfA*SfU*SfU*SfU*SfC*SfU | | | | |
| | CU | | | | | | |
| WV-2741 | UCAAGG | 383 | fU*SfC*SfA*SfA*SfG*SfG*SmA | 1135 | SSSSSSROOOO | | Exon 51 |
| | AAGAUG | | *RmAmGmAmUmGmG*RmC*S | | ORSSSSSS | | |
| | GCAUUU | | fA*SfU*SfU*SfU*SfC*SfU | | | | |
| | CU | | | | | | |
| WV-2742 | UCAAGG | 384 | fU*SfC*SfA*SfA*SfG*SfG*SmA | 1136 | SSSSSSSSOOOS | | Exon 51 |
| | AAGAUG | | *SmA*SmGmAmUmG*SmG*Sm | | SSSSSSS | | |
| | GCAUUU | | C*SfA*SfU*SfU*SfU*SfC*SfU | | | | |
| | CU | | | | | | |
| WV-2743 | UCAAGG | 385 | fU*SfC*SfA*SfA*SfG*SfG*SmA | 1137 | SSSSSSSOOOO | | Exon 51 |
| | AAGAUG | | *SmAmGmAmUmGmG*SmC*Sf | | OSSSSSSS | | |
| | GCAUUU | | A*SfU*SfU*SfU*SfC*SfU | | | | |
| | CU | | | | | | |
| WV-2744 | UCAAGG | 386 | fU*SfC*SfA*SfA*SfG*SfG*SmA | 1138 | SSSSSSSSSSSSS | | Exon 51 |
| | AAGAUG | | *SmA*SmG*SmA*SmU*SmG*S | | SSSSSS | | |
| | GCAUUU | | mG*SmC*SfA*SfU*SfU*SfU*Sf | | | | |
| | CU | | C*SfU | | | | |
| WV-2745 | UCAAGG | 387 | fU*SfC*SfA*SfA*SfG*SfG*SmA | 1139 | SSSSSSOOOOS | | Exon 51 |
| | AAGAUG | | mAmGmAfU*SmGmG*SfC*SfA | | OSSSSSSS | | |
| | GCAUUU | | *SfU*SfU*SfU*SfC*SfU | | | | |
| | CU | | | | | | |
| WV-2746 | UCAAGG | 388 | fU*SfC*SfA*SfA*SfG*SfG*SmA | 1140 | SSSSSSRRRRSR | | Exon 51 |
| | AAGAUG | | *RmA*RmG*RmA*RfU*SmG*R | | SSSSSSS | | |
| | GCAUUU | | mG*SfC*SfA*SfU*SfU*SfU*SfC | | | | |
| | CU | | *SfU | | | | |
| WV-2747 | UCAAGG | 389 | fU*SfC*SfA*SfA*SmG*SmG*Sf | 1141 | SSSSSSOOOOS | | Exon 51 |
| | AAGAUG | | AfAmGmAfU*SmGmG*SfC*SfA | | OSSSSSSS | | |
| | GCAUUU | | *SfU*SfU*SfU*SfC*SfU | | | | |
| | CU | | | | | | |
| WV-2748 | UCAAGG | 390 | fU*SfC*SfA*SfA*SmG*SmG*Sf | 1142 | SSSSSSRRRRSR | | Exon 51 |
| | AAGAUG | | A*RfA*RmG*RmA*RfU*SmG* | | SSSSSSS | | |
| | GCAUUU | | RmG*SfC*SfA*SfU*SfU*SfU*Sf | | | | |
| | CU | | C*SfU | | | | |
| WV-2749 | UCAAGG | 391 | fU*SfC*SfA*SfA*SfG*SfG*SfA | 1143 | SSSSSSSOOOO | | Exon 51 |
| | AAGAUG | | *SmAmGmAmUmGmG*SfC*Sf | | OSSSSSSS | | |
| | GCAUUU | | A*SfU*SfU*SfU*SfC*SfU | | | | |
| | CU | | | | | | |
| WV-2750 | UCAAGG | 392 | fU*SfC*SfA*SfA*SfG*SfG*SfA | 1144 | SSSSSSSRRRRR | | Exon 51 |
| | AAGAUG | | *SmA*RmG*RmA*RmU*RmG* | | SSSSSSS | | |
| | GCAUUU | | RmG*SfC*SfA*SfU*SfU*SfU*Sf | | | | |
| | CU | | C*SfU | | | | |
| WV-2791 | UCAAGG | 393 | mU*SmC*SmA*SfA*SfG*SfG*S | 1145 | SSSSSSRRRRRR | | Exon 51 |
| | AAGAUG | | mA*RmA*RmG*RmA*RmU*Rm | | RSSSSSS | | |
| | GCAUUU | | G*RmG*RmC*SfA*SfU*SfU*S | | | | |
| | CU | | mU*SmC*SmU | | | | |
| WV-2792 | UCAAGG | 394 | mU*SmC*SmA*SfA*SfG*SfG*S | 1146 | SSSSSSSRRRRR | | Exon 51 |
| | AAGAUG | | fA*SmA*RmG*RmA*RmU*Rm | | SSSSSSS | | |
| | GCAUUU | | G*RmG*SfC*SfA*SfU*SfU*Sm | | | | |
| | CU | | U*SmC*SmU | | | | |
| WV-2793 | UCAAGG | 395 | mU*SmC*SmA*SfA*SfG*SfG*S | 1147 | SSSSSSSSRRRS | | Exon 51 |
| | AAGAUG | | fA*SfA*SmG*RmA*RmU*RmG | | SSSSSSS | | |
| | GCAUUU | | *SfG*SfC*SfA*SfU*SfU*SmU*S | | | | |
| | CU | | mC*SmU | | | | |
| WV-2794 | UCAAGG | 396 | mU*SmC*SmA*SfA*SfG*SfG*S | 1148 | SSSSSSSSSRSSS | | Exon 51 |
| | AAGAUG | | fA*SfA*SfG*SmA*RmU*SfG*Sf | | SSSSSS | | |
| | GCAUUU | | G*SfC*SfA*SfU*SfU*SmU*Sm | | | | |
| | CU | | C*SmU | | | | |
| WV-2795 | UCAAGG | 397 | mU*SmC*SmA*SfA*SfG*SfG*S | 1149 | SSSSSSSSOOOS | | Exon 51 |
| | AAGAUG | | fA*SfA*SmGmAmUmG*SfG*Sf | | SSSSSSS | | |
| | GCAUUU | | C*SfA*SfU*SfU*SmU*SmC*Sm | | | | |
| | CU | | U | | | | |
| WV-2796 | UCAAGG | 398 | mU*SmC*SmA*SfA*SfG*SfG*S | 1150 | SSSSSSSSSOSSS | | Exon 51 |
| | AAGAUG | | fA*SfA*SfG*SmAmU*SfG*SfG* | | SSSSSS | | |
| | GCAUUU | | SfC*SfA*SfU*SfU*SmU*SmC*S | | | | |
| | CU | | mU | | | | |
| WV-2797 | UCAAGG | 399 | fU*fC*fA*fA*fG*fG*fA*fA*mG | 1151 | XXXXXXXXXX | randomer based on | DMD |
| | AAGAUG | | *mA*mU*mG*mG*fC*fA*fU*f | | XXXXXXXXX | WV-2526 | |
| | GCAUUU | | U*fU*fC*fU | | | | |
| | CU | | | | | | |
| WV-2798 | UCAAGG | 400 | fU*fC*fA*fA*fG*fG*fA*fA*mG | 1152 | XXXXXXXXXX | randomer based on | DMD |
| | AAGAUG | | *mA*mU*mG*fG*fC*fA*fU*fU | | XXXXXXXXX | WV-2527 | |
| | GCAUUU | | *fU*fC*fU | | | | |
| | CU | | | | | | |
| WV-2799 | UCAAGG | 401 | fU*fC*fA*fA*fG*fG*fA*fA*fG* | 1153 | XXXXXXXXXX | randomer based on | DMD |
| | AAGAUG | | mA*mU*fG*fG*fC*fA*fU*fU*f | | XXXXXXXXX | WV-2528 | |
| | GCAUUU | | U*fC*fU | | | | |
| | CU | | | | | | |
| WV-2800 | UCAAGG | 402 | fU*fC*fA*fA*fG*fG*fA*mA*m | 1154 | XXXXXXXXXX | randomer based on | DMD |
| | AAGAUG | | G*mA*mU*mG*mG*fC*fA*fU* | | XXXXXXXXX | WV-2750 | |
| | GCAUUU | | fU*fU*fC*fU | | | | |
| | CU | | | | | | |
| WV-2801 | UCAAGG | 403 | mU*mC*mA*fA*fG*fG*mA*mA | 1155 | XXXXXXXXXX | randomer based on | DMD |
| | AAGAUG | | *mG*mA*mU*mG*mG*mC*fA* | | XXXXXXXXX | WV-2791 | |
| | GCAUUU | | fU*fU*mU*mC*mU | | | | |
| | CU | | | | | | |
| WV-2802 | UCAAGG | 404 | mU*mC*mA*fA*fG*fG*fA*mA | 1156 | XXXXXXXXXX | randomer based on | DMD |
| | AAGAUG | | *mG*mA*mU*mG*mG*fC*fA*f | | XXXXXXXXX | WV-2792 | |
| | GCAUUU | | U*fU*mU*mC*mU | | | | |
| | CU | | | | | | |
| WV-2803 | UCAAGG | 405 | mU*mC*mA*fA*fG*fG*fA*fA* | 1157 | XXXXXXXXXX | randomer based on | DMD |
| | AAGAUG | | mG*mA*mU*mG*fG*fC*fA*fU | | XXXXXXXXX | WV-2793 | |
| | GCAUUU | | *fU*mU*mC*mU | | | | |
| | CU | | | | | | |
| WV-2804 | UCAAGG | 406 | mU*mC*mA*fA*fG*fG*fA*fA*f | 1158 | XXXXXXXXXX | randomer based on | DMD |
| | AAGAUG | | G*mA*mU*fG*fG*fC*fA*fU*fU | | XXXXXXXXX | WV-2794 | |
| | GCAUUU | | *mU*mC*mU | | | | |
| | CU | | | | | | |
| WV-2805 | UCAAGG | 407 | mU*mC*mA*fA*fG*fG*fA*fA* | 1159 | XXXXXXXXOO | randomer based on | DMD |
| | AAGAUG | | mGmAmUmG*fG*fC*fA*fU*fU | | OXXXXXXXX | WV-2795 | |
| | GCAUUU | | *mU*mC*mU | | | | |
| | CU | | | | | | |
| WV-2806 | UCAAGG | 408 | mU*mC*mA*fA*fG*fG*fA*fA*f | 1160 | XXXXXXXXXO | randomer based on | DMD |
| | AAGAUG | | G*mAmU*fG*fG*fC*fA*fU*fU* | | XXXXXXX | WV-2796 | |
| | GCAUUU | | mU*mC*mU | | | | |
| | CU | | | | | | |
| WV-2807 | UCAAGG | 409 | Mod024L001*mU*mC*mA*mA* | 1161 | OXXXXXXXXX | All-OMe full-PS | Exon 51 |
| | AAGAUG | | mG*mG*mA*mA*mG*mA*mU* | | XXXXXXXXXX | TriGlcNAc conjugated | |
| | GCAUUU | | mG*mG*mC*mA*mU*mU*mU* | | X | WV942 C6 PS | |
| | CU | | mC*mU | | | | |
| WV-2808 | UCAAGG | 410 | Mod026L001*mU*mC*mA*mA* | 1162 | OXXXXXXXXX | All-OMe full-PS | Exon 51 |
| | AAGAUG | | mG*mG*mA*mA*mG*mA*mU* | | XXXXXXXXXX | TrialphaMannose | |
| | GCAUUU | | mG*mG*mC*mA*mU*mU*mU* | | X | conjugated WV942 C6 | |
| | CU | | mC*mU | | | PS | |
| WV-2812 | UCAAGG | 411 | fU*fC*fA*fA*fG*fG*mA*mA*m | 1163 | XXXXXXXXXX | WV-1714 based BrdU | DMD exon |
| | AAGATG | | G*mA*BrdU*mG*mG*mC*fA*f | | XXXXXXXXX | in the center | 51 |
| | GCAUUU | | U*fU*fU*fC*fU | | | | |
| | CU | | | | | | |
| WV-2813 | UCAAGG | 412 | fU*fC*fA*fA*fG*fG*fA*fA*fG* | 1164 | XXXXXXXXXX | WV-2528 and WV- | DMD exon |
| | AAGATG | | mA*BrdU*fG*fG*fC*fA*fU*fU* | | XXXXXXXXX | 2799 based randomer | 51 |
| | GCAUUU | | fU*fC*fU | | | BrdU in the center | |
| | CU | | | | | | |
| WV-2814 | UCAAGG | 413 | mU*mC*mA*mA*mG*mG*mA* | 1165 | XXXXXXXXXX | WV-942 based BrdU | DMD exon |
| | AAGATG | | mA*mG*mA*BrdU*mG*mG*m | | XXXXXXXXX | in the center | 51 |
| | GCAUUU | | C*mA*mU*mU*mU*mC*mU | | | | |
| | CU | | | | | | |
| WV-3017 | UCAAGG | 414 | fU*SfC*SfA*SfA*SfG*SfG*SfA | 1166 | SSSSSSSSOOOS | WV-2530 based, BrdU | Exon 51 |
| | AAGATG | | *SfA*SmGmABrdUmG*SfG*SfC | | SSSSSSS | in the middle | |
| | GCAUUU | | *SfA*SfU*SfU*SfU*SfC*SfU | | | | |
| | CU | | | | | | |
| WV-3018 | UCAAGG | 415 | fU*fC*fA*fA*fG*fG*fA*fA*mG | 1167 | XXXXXXXXOO | WV-2530 based, | Exon 51 |
| | AAGATG | | mABrdUmG*fG*fC*fA*fU*fU*f | | OXXXXXXXX | randomer, BrdU in the | |
| | GCAUUU | | U*fC*fU | | | middle | |
| | CU | | | | | | |
| WV-3019 | UCAAGG | 416 | fU*SfC*SfA*SfA*SfG*SfG*SmA | 1168 | SSSSSSOOOOO | WV-2438 based, BrdU | Exon 51 |
| | AAGATG | | mAmGmABrdUmGmGmC*SfA* | | OOSSSSSS | in the middle | |
| | GCAUUU | | SfU*SfU*SfU*SfC*SfU | | | | |
| | CU | | | | | | |
| WV-3020 | UCAAGG | 417 | fU*fC*fA*fA*fG*fG*mAmAmG | 1169 | XXXXXXOOOO | WV-2438 based, | Exon 51 |
| | AAGATG | | mABrdUmGmGmC*fA*fU*fU*f | | OOOXXXXXX | randomer, BrdU in the | |
| | GCAUUU | | U*fC*fU | | | middle | |
| | CU | | | | | | |
| WV-3022 | UCAAGG | 418 | L001*fU*SfC*SfA*SfA*SfG*Sf | 1170 | XSSSSSSOOOO | WV-2438 based; C6 | DMD |
| | AAGAUG | | G*SmAmAmGmAmUmGmGmC | | OOOSSSSSS | PS; on support; used | |
| | GCAUUU | | *SfA*SfU*SfU*SfU*SfC*SfU | | | for conjugation | |
| | CU | | | | | | |
| WV-3023 | UCAAGG | 419 | Mod015L001*fU*SfC*SfA*SfA* | 1171 | OXSSSSSSOOO | WV-2438 based; | DMD |
| | AAGAUG | | SfG*SfG*SmAmAmGmAmUmG | | OOOOSSSSSS | conjugate with stearic | |
| | GCAUUU | | mGmC*SfA*SfU*SfU*SfU*SfC* | | | acid C6 PS | |
| | CU | | SfU | | | | |
| WV-3024 | UCAAGG | 420 | Mod006L001*fU*SfC*SfA*SfA* | 1172 | OXSSSSSSOOO | WV-2438 based; | DMD |
| | AAGAUG | | SfG*SfG*SmAmAmGmAmUmG | | OOOOSSSSSS | conjugate with DHA | |
| | GCAUUU | | mGmC*SfA*SfU*SfU*SfU*SfC* | | | C6 PS | |
| | CU | | SfU | | | | |
| WV-3025 | UCAAGG | 421 | L001*fU*SfC*SfA*SfA*SfG*Sf | 1173 | XSSSSSSSSOOO | WV-2530 based; C6 | DMD |
| | AAGAUG | | G*SfA*SfA*SmGmAmUmG*SfG | | SSSSSSSS | PS; on support; used | |
| | GCAUUU | | *SfC*SfA*SfU*SfU*SfU*SfC*Sf | | | for conjugation | |
| | CU | | U | | | | |
| WV-3026 | UCAAGG | 422 | Mod015L001*fU*SfC*SfA*SfA* | 1174 | OXSSSSSSSSOO | WV-2530 based; | DMD |
| | AAGAUG | | SfG*SfG*SfA*SfA*SmGmAmU | | OSSSSSSSS | conjugate with stearic | |
| | GCAUUU | | mG*SfG*SfC*SfA*SfU*SfU*SfU | | | acid C6 PS | |
| | CU | | *SfC*SfU | | | | |
| WV-3027 | UCAAGG | 423 | Mod006L001*fU*SfC*SfA*SfA* | 1175 | OXSSSSSSSSOO | WV-2530 based; | DMD |
| | AAGAUG | | SfG*SfG*SfA*SfA*SmGmAmU | | OSSSSSSSS | conjugate with DHA | |
| | GCAUUU | | mG*SfG*SfC*SfA*SfU*SfU*SfU | | | C6 PS | |
| | CU | | *SfC*SfU | | | | |
| WV-3028 | UCAAGG | 424 | fU*SfC*SfA*SfA*SfG*SfG*SfA | 1176 | SSSSSSSSOOOO | WV-2529 based, | DMD |
| | AAGAUG | | *SfA*SmGmAmUmGmG*SfC*Sf | | SSSSSSS | convert PO between | |
| | GCAUUU | | A*SfU*SfU*SfU*SfC*SfU | | | 8th and 9th nt to PS | |
| | CU | | | | | | |
| WV-3029 | UCAAGG | 425 | L001*fU*fC*fA*fA*fG*fG*mA* | 1177 | XXXXXXXXXX | WV-1714 based; | DMD |
| | AAGAUG | | mA*mG*mA*mU*mG*mG*mC* | | XXXXXXXXXX | stereorandom; C6 PS; | |
| | GCAUUU | | fA*fU*fU*fU*fC*fU | | | on support | |
| | CU | | | | | | |
| WV-3030 | UCAAGG | 426 | Mod015L001*fU*fC*fA*fA*fG*f | 1178 | OXXXXXXXXX | WV-1714 based; | DMD |
| | AAGAUG | | G*mA*mA*mG*mA*mU*mG*m | | XXXXXXXXX | stereorandom; | |
| | GCAUUU | | G*mC*fA*fU*fU*fU*fC*fU | | X | conjugate with stearic | |
| | CU | | | | | acid C6 PS | |
| WV-3031 | UCAAGG | 427 | Mod006L001*fU*fC*fA*fA*fG*f | 1179 | OXXXXXXXXX | WV-1714 based; | DMD |
| | AAGAUG | | G*mA*mA*mG*mA*mU*mG*m | | XXXXXXXXX | stereorandom; | |
| | GCAUUU | | G*mC*fA*fU*fU*fU*fC*fU | | X | conjugate with DHA | |
| | CU | | | | | C6 PS | |
| WV-3032 | UCAAGG | 428 | Mod020L001*fU*fC*fA*fA*fG*f | 1180 | OXXXXXXXXX | WV-1714 based; | DMD |
| | AAGAUG | | G*mA*mA*mG*mA*mU*mG*m | | XXXXXXXXX | stereorandom; | |
| | GCAUUU | | G*mC*fA*fU*fU*fU*fC*fU | | X | conjugate with | |
| | CU | | | | | turbinaric acid C6 PS | |
| WV-3033 | UCAAGG | 429 | Mod019L001*fU*fC*fA*fA*fG*f | 1181 | OXXXXXXXXX | WV-1714 based; | DMD |
| | AAGAUG | | G*mA*mA*mG*mA*mU*mG*m | | XXXXXXXXX | stereorandom; | |
| | GCAUUU | | G*mC*fA*fU*fU*fU*fC*fU | | X | conjugate with | |
| | CU | | | | | gamma-Linolenic acid | |
| | | | | | | C6 PS | |
| WV-3034 | UCAAGG | 430 | L001*fU*fC*fA*fA*fG*fG*fA*f | 1182 | XXXXXXXXXO | WV-2530 based; | DMD |
| | AAGAUG | | A*mGmAmUmG*fG*fC*fA*fU* | | OOXXXXXXXX | stereorandom; C6 PS; | |
| | GCAUUU | | fU*fU*fC*fU | | | on support | |
| | CU | | | | | | |
| WV-3035 | UCAAGG | 431 | Mod015L001*fU*fC*fA*fA*fG*f | 1183 | OXXXXXXXXX | WV-2530 based; | DMD |
| | AAGAUG | | G*fA*fA*mGmAmUmG*fG*fC* | | OOOXXXXXXX | stereorandom; | |
| | GCAUUU | | fA*fU*fU*fU*fC*fU | | X | conjugate with stearic | |
| | CU | | | | | acid C6 PS | |
| WV-3036 | UCAAGG | 432 | Mod006L001*fU*fC*fA*fA*fG*f | 1184 | OXXXXXXXXX | WV-2530 based; | DMD |
| | AAGAUG | | G*fA*fA*mGmAmUmG*fG*fC* | | OOOXXXXXXX | stereorandom; | |
| | GCAUUU | | fA*fU*fU*fU*fC*fU | | X | conjugate with DHA | |
| | CU | | | | | C6 PS | |
| WV-3037 | UCAAGG | 433 | Mod020L001*fU*fC*fA*fA*fG*f | 1185 | OXXXXXXXXX | WV-2530 based; | DMD |
| | AAGAUG | | G*fA*fA*mGmAmUmG*fG*fC* | | OOOXXXXXXX | stereorandom; | |
| | GCAUUU | | fA*fU*fU*fU*fC*fU | | X | conjugate with | |
| | CU | | | | | turbinaric acid C6 PS | |
| WV-3038 | UCAAGG | 434 | Mod019L001*fU*fC*fA*fA*fG*f | 1186 | OXXXXXXXXX | WV-2530 based; | DMD |
| | AAGAUG | | G*fA*fA*mGmAmUmG*fG*fC* | | OOOXXXXXXX | stereorandom; | |
| | GCAUUU | | fA*fU*fU*fU*fC*fU | | X | conjugate with | |
| | CU | | | | | gamma-Linolenic acid | |
| WV-3039 | UCAAGG | 435 | fU*fC*fA*fA*fG*fG*mAmAmG | 1187 | XXXXXXOOOX | Randomer of WV- | DMD exon |
| | AAGAUG | | mA*mUmGmGmC*fA*fU*fU*f | | OOOXXXXXX | 2737; based on WV- | 51 |
| | GCAUUU | | U*fC*fU | | | 2438; with Rp/PO in | |
| | CU | | | | | the core | |
| WV-3040 | UCAAGG | 436 | fU*fC*fA*fA*fG*fG*mAmAmG | 1188 | XXXXXXOOXX | Randomer of WV- | DMD exon |
| | AAGAUG | | *mA*mU*mGmGmC*fA*fU*fU* | | XOOXXXXXX | 2738; based on WV- | 51 |
| | GCAUUU | | fU*fC*fU | | | 2438; with Rp/PO in | |
| | CU | | | | | the core | |
| WV-3041 | UCAAGG | 437 | fU*fC*fA*fA*fG*fG*mAmA*m | 1189 | XXXXXXOXXX | Randomer of WV- | DMD exon |
| | AAGAUG | | G*mA*mU*mG*mGmC*fA*fU*f | | XXXXXXXX | 2739; based on WV- | 51 |
| | GCAUUU | | U*fU*fC*fU | | | 2438; with Rp/PO in | |
| | CU | | | | | the core | |
| WV-3042 | UCAAGG | 438 | fU*fC*fA*fA*fG*fG*mA*mA*m | 1190 | XXXXXXXXOO | Randomer of WV- | DMD exon |
| | AAGAUG | | GmAmUmG*mG*mC*fA*fU*fU | | OXXXXXXXX | 2740; based on WV- | 51 |
| | GCAUUU | | *fU*fC*fU | | | 2438; with Rp/PO in | |
| | CU | | | | | the core | |
| WV-3043 | UCAAGG | 439 | fU*fC*fA*fA*fG*fG*mA*mAm | 1191 | XXXXXXXOOO | Randomer of WV- | DMD exon |
| | AAGAUG | | GmAmUmGmG*mC*fA*fU*fU* | | OOXXXXXXX | 2741; based on WV- | 51 |
| | GCAUUU | | fU*fC*fU | | | 2438; with Rp/PO in | |
| | CU | | | | | the core | |
| WV-3044 | UCAAGG | 440 | fU*fC*fA*fA*fG*fG*mA*mA*m | 1192 | XXXXXXXXOO | Randomer of WV- | DMD exon |
| | AAGAUG | | GmAmUmG*mG*mC*fA*fU*fU | | OXXXXXXXX | 2742; based on WV- | 51 |
| | GCAUUU | | *fU*fC*fU | | | 2438; with Sp/PO in | |
| | CU | | | | | the core | |
| WV-3045 | UCAAGG | 441 | fU*fC*fA*fA*fG*fG*mA*mAm | 1193 | XXXXXXXOOO | Randomer of WV- | DMD exon |
| | AAGAUG | | GmAmUmGmG*mC*fA*fU*fU* | | OOXXXXXXX | 2743; based on WV- | 51 |
| | GCAUUU | | fU*fC*fU | | | 2438; with Sp/PO in | |
| | CU | | | | | the core | |
| WV-3046 | UCAAGG | 442 | fU*fC*fA*fA*fG*fG*mAmAmG | 1194 | XXXXXXOOOO | Randomer of WV- | DMD exon |
| | AAGAUG | | mAfU*mGmG*fC*fA*fU*fU*fU | | XOXXXXXXX | 2745; based on WV- | 51 |
| | GCAUUU | | *fC*fU | | | 2444; Sp/PO in the | |
| | CU | | | | | core; with additional | |
| | | | | | | fU fC in the core | |
| WV-3047 | UCAAGG | 443 | fU*fC*fA*fA*fG*fG*mA*mA*m | 1195 | XXXXXXXXXX | Randomer of WV- | DMD exon |
| | AAGAUG | | G*mA*fU*mG*mG*fC*fA*fU*f | | XXXXXXXXX | 2746; based on WV- | 51 |
| | GCAUUU | | U*fU*fC*fU | | | 2444; Sp/Rp in the | |
| | CU | | | | | core; with additional | |
| | | | | | | fU fC in the core | |
| WV-3048 | UCAAGG | 444 | fU*fC*fA*fA*mG*mG*fAfAmG | 1196 | XXXXXXOOOO | Randomer of WV- | DMD exon |
| | AAGAUG | | mAfU*mGmG*fC*fA*fU*fU*fU | | XOXXXXXXX | 2747; based on WV- | 51 |
| | GCAUUU | | *fC*fU | | | 2444; Sp/PO in the | |
| | CU | | | | | core; with mGmG on | |
| | | | | | | left wing, with | |
| | | | | | | additional fA fA fU fC | |
| | | | | | | in the core | |
| WV-3049 | UCAAGG | 445 | fU*fC*fA*fA*mG*mG*fA*fA*m | 1197 | XXXXXXXXXX | Randomer of WV- | DMD exon |
| | AAGAUG | | G*mA*fU*mG*mG*fC*fA*fU*f | | XXXXXXXXX | 2748; based on WV- | 51 |
| | GCAUUU | | U*fU*fC*fU | | | 2444; Sp/Rp in the | |
| | CU | | | | | core; with mGmG on | |
| | | | | | | left wing, with | |
| | | | | | | additional fA fA fU fC | |
| | | | | | | in the core | |
| WV-3050 | UCAAGG | 446 | fU*fC*fA*fA*fG*fG*mA*mA*m | 1198 | XXXXXXXXXX | All PS version of the | DMD exon |
| | AAGAUG | | G*mA*fU*mG*mG*fC*fA*fU*f | | XXXXXXXXX | randomer of WV- | 51 |
| | GCAUUU | | U*fU*fC*fU | | | 2745/2746; based on | |
| | CU | | | | | WV-2444; with | |
| | | | | | | additional fU fC in the | |
| | | | | | | core | |
| WV-3051 | UCAAGG | 447 | fU*fC*fA*fA*mG*mG*fA*fA*m | 1199 | XXXXXXXXXX | All PS version of the | DMD exon |
| | AAGAUG | | G*mA*fU*mG*mG*fC*fA*fU*f | | XXXXXXXXX | randomer of WV- | 51 |
| | GCAUUU | | U*fU*fC*fU | | | 2747/2748; based on | |
| | CU | | | | | WV-2444; Sp/PO in | |
| | | | | | | the core; with mGmG | |
| | | | | | | on left wing, with | |
| | | | | | | additional fA fA fU fC | |
| | | | | | | in the core | |
| WV-3052 | UCAAGG | 448 | fU*fC*fA*fA*mG*mG*fA*fA*m | 1200 | XXXXXXXXOO | Based on WV-2530; | DMD exon |
| | AAGAUG | | GmAmUmG*mG*fC*fA*fU*fU* | | OXXXXXXXX | replace all 2′F G with | 51 |
| | GCAUUU | | fU*fC*fU | | | 2′Ome G | |
| | CU | | | | | | |
| WV-3053 | UCAAGG | 449 | fU*fC*fA*fA*mG*mG*mA*mA | 1201 | XXXXXXXXOO | Based on WV-2107; | DMD exon |
| | AAGAUG | | *mGmAfUmG*mG*fC*fA*fU*f | | OXXXXXXXX | four 2′-F on the 5′; | 51 |
| | GCAUUU | | U*fU*fC*fU | | | seven 2′-F on the 3′; | |
| | CU | | | | | 2′F U in the center | |
| WV-3054 | UCAAGG | 450 | fU*fC*fA*fA*mG*mG*fA*fA*m | 1202 | XXXXXXXXXX | All PS; based on WV- | DMD exon |
| | AAGAUG | | G*mA*mU*mG*mG*fC*fA*fU* | | XXXXXXXXX | 2530/2529; replace all | 51 |
| | GCAUUU | | fU*fU*fC*fU | | | 2′F G with 2′Ome G | |
| | CU | | | | | | |
| WV-3055 | UCAAGG | 451 | fU*fC*fA*fA*mG*mG*mA*mA | 1203 | XXXXXXXXXX | All PS; based on WV- | DMD exon |
| | AAGAUG | | *mG*mA*fU*mG*mG*fC*fA*f | | XXXXXXXXX | 2107; four 2′-F on the | 51 |
| | GCAUUU | | U*fU*fU*fC*fU | | | 5′; seven 2′-F on the 3′; | |
| | CU | | | | | 2′F U in the center | |
| WV-3056 | UCAAGG | 452 | fU*fC*fA*fA*mG*mG*fAfAmG | 1204 | XXXXXXOOOX | Based on WV-2747; | DMD exon |
| | AAGAUG | | mA*fU*mGmG*fC*fA*fU*fU*f | | XOXXXXXXX | with additional PS in | 51 |
| | GCAUUU | | U*fC*fU | | | the center between A | |
| | CU | | | | | and U | |
| WV-3057 | UCAAGG | 453 | fU*fC*fA*fA*mG*mG*fA*fA*m | 1205 | XXXXXXXXXX | All PS version; based | DMD exon |
| | AAGAUG | | G*mA*fU*mG*mG*fC*fA*fU*f | | XXXXXXXXX | on WV-2747; with | 51 |
| | GCAUUU | | U*fU*fC*fU | | | additional PS in the | |
| | CU | | | | | center between A and | |
| | | | | | | U | |
| WV-3058 | UCAAGG | 454 | fU*fC*fA*fA*mG*mG*fA*fA*m | 1206 | XXXXXXXXXX | Based on WV-1716; | DMD exon |
| | AAGAUG | | G*fA*fU*mG*mG*fC*fA*fU*fU | | XXXXXXXXX | with all mC converted | 51 |
| | GCAUUU | | *fU*fC*fU | | | to fC | |
| | CU | | | | | | |
| WV-3059 | UCAAGG | 455 | fU*fC*fA*fA*mG*mG*fA*fA*m | 1207 | XXXXXXXXOO | Randomers of based | DMD exon |
| | AAGAUG | | GmAmUmGmG*fC*fA*fU*fU*f | | OOXXXXXXX | on WV-2529; with all | 51 |
| | GCAUUU | | U*fC*fU | | | G as mG; with | |
| | CU | | | | | additional PS between | |
| | | | | | | A and G | |
| WV-3060 | UCAAGG | 456 | fU*fC*fA*fA*mG*mG*fA*fA*m | 1208 | XXXXXXXXOO | Randomer; Sp/PO in | DMD exon |
| | AAGAUG | | GmAfU*mGmG*fC*fA*fU*fU*f | | XOXXXXXXX | the core; with mGmG | 51 |
| | GCAUUU | | U*fC*fU | | | on left wing, with | |
| | CU | | | | | additional fA fA fU fC | |
| | | | | | | in the core | |
| WV-3061 | UCAAGG | 457 | fU*fC*fA*fA*mG*mG*mA*mA | 1209 | XXXXXXXXOO | Based on WV-2107; | DMD exon |
| | AAGAUG | | *mGmAfU*mGmG*fC*fA*fU*f | | XOXXXXXXX | four 2′-F on the 5′; | 51 |
| | GCAUUU | | U*fU*fC*fU | | | seven 2′-F on the 3′; | |
| | CU | | | | | 2′F U in the center | |
| WV-3070 | UCAAGG | 458 | fU*SfC*SfA*SfA*SfG*SfG*SmA | 1210 | SSSSSSOOOOD | WV-2438 based, with | Exon 51 |
| | AAGAUG | | mAmGmAmU:mGmGmC*SfA*S | | OOSSSSSS | PS2 after nucleotide | |
| | GCAUUU | | fU*SfU*SfU*SfC*SfU | | | 11 | |
| | CU | | | | | | |
| WV-3071 | UCAAGG | 459 | fU*SfC*SfA*SfA*SfG*SfG*SmA | 1211 | SSSSSSODODO | WV-2438 based, with | Exon 51 |
| | AAGAUG | | mA:mGmA:mUmG:mGmC*SfA* | | DOSSSSSS | PS2 after nucleotide 8, | |
| | GCAUUU | | SfU*SfU*SfU*SfC*SfU | | | 10, 12 | |
| | CU | | | | | | |
| WV-3072 | UCAAGG | 460 | fU*SfC*SfA*SfA*SfG*SfG*SmA | 1212 | SSSSSSDODOD | WV-2438 based, with | Exon 51 |
| | AAGAUG | | :mAmG:mAmU:mGmG:mC*SfA | | ODSSSSSS | PS2 after nucleotide 7, | |
| | GCAUUU | | *SfU*SfU*SfU*SfC*SfU | | | 9, 11, 13 | |
| | CU | | | | | | |
| WV-3073 | UCAAGG | 461 | fU*SfC*SfA*SfA*SfG*SfG*SmA | 1213 | SSSSSSDOOOD | WV-2438 based, with | Exon 51 |
| | AAGAUG | | :mAmGmAmU:mGmG:mC*SfA* | | ODSSSSSS | PS2 after nucleotide 7, | |
| | GCAUUU | | SfU*SfU*SfU*SfC*SfU | | | 10, 13 | |
| | CU | | | | | | |
| WV-3074 | UCAAGG | 462 | fU*SfC*SfA*SfA*fG:fG:mAmA | 1214 | SSSXDDOOOO | WV-2438 based, with | Exon 51 |
| | AAGAUG | | mGmAmU:mGmGmC*SfA*SfU* | | DOOSSSSSS | PS2 after nucleotide | |
| | GCAUUU | | SfU*SfU*SfC*SfU | | | 11; two SfG * on 5′ | |
| | CU | | | | | wing converted to fG- | |
| | | | | | | PS2 | |
| WV-3075 | UCAAGG | 463 | fU*SfC*SfA*SfA*mG:mG:mAm | 1215 | SSSXDDOOOO | WV-2438 based, with | Exon 51 |
| | AAGAUG | | AmGmAmU:mGmGmC*SfA*Sf | | DOOSSSSSS | PS2 after nucleotide | |
| | GCAUUU | | U*SfU*SfU*SfC*SfU | | | 11; two SfG * on 5′ | |
| | CU | | | | | wing converted to mG- | |
| | | | | | | PS2 | |
| WV-3076 | UCAAGG | 464 | fU*SfC*SfA*SfA*SfG*SfG*SfA | 1216 | SSSSSSSOOOD | WV-2749 based, with | Exon 51 |
| | AAGAUG | | *SmAmGmAmU:mGmG*SfC*Sf | | OSSSSSSS | PS2 after nucleotide | |
| | GCAUUU | | A*SfU*SfU*SfU*SfC*SfU | | | 11 | |
| | CU | | | | | | |
| WV-3077 | UCAAGG | 465 | fU*SfC*SfA*SfA*fG:fG:fA*SmA | 1217 | SSSXDDSOOOD | WV-2749 based, with | Exon 51 |
| | AAGAUG | | mGmAmU:mGmG*SfC*SfA*SfU | | OSSSSSSS | PS2 after nucleotide | |
| | GCAUUU | | *SfU*SfU*SfC*SfU | | | 11; two SfG * on 5′ | |
| | CU | | | | | wing converted to fG- | |
| | | | | | | PS2 | |
| WV-3078 | UCAAGG | 466 | fU*SfC*SfA*SfA*mG:mG:fA*S | 1218 | SSSXDDSOOOD | WV-2749 based, with | Exon 51 |
| | AAGAUG | | mAmGmAmU:mGmG*SfC*SfA* | | OSSSSSSS | PS2 after nucleotide | |
| | GCAUUU | | SfU*SfU*SfU*SfC*SfU | | | 11; two SfG * on 5′ | |
| | CU | | | | | wing converted to mG- | |
| | | | | | | PS2 | |
| WV-3079 | UCAAGG | 467 | fU*SfC*SfA*SfA*SfG*SfG*SfA | 1219 | SSSSSSSSOODS | WV-2530 based, with | Exon 51 |
| | AAGAUG | | *SfA*SmGmAmU:mG*SfG*SfC* | | SSSSSSS | PS2 after nucleotide | |
| | GCAUUU | | SfA*SfU*SfU*SfU*SfC*SfU | | | 11 | |
| | CU | | | | | | |
| WV-3080 | UCAAGG | 468 | fU*SfC*SfA*SfA*SfG*SfG*SfA | 1220 | SSSSSSSSDDDS | WV-2530 based, with | Exon 51 |
| | AAGAUG | | *SfA*SmG:mA:mU:mG*SfG*Sf | | SSSSSSS | PS2 after nucleotide 9, | |
| | GCAUUU | | C*SfA*SfU*SfU*SfU*SfC*SfU | | | 10,11 | |
| | CU | | | | | | |
| WV-3081 | UCAAGG | 469 | fU*SfC*SfA*SfA*SfG*SfG*SfA | 1221 | SSSSSSSSDODS | WV-2530 based, with | Exon 51 |
| | AAGAUG | | *SfA*SmG:mAmU:mG*SfG*SfC | | SSSSSSS | PS2 after nucleotide 9, | |
| | GCAUUU | | *SfA*SfU*SfU*SfU*SfC*SfU | | | 11 | |
| | CU | | | | | | |
| WV-3082 | UCAAGG | 470 | fU*SfC*SfA*SfA*fG:fG:fA*SfA | 1222 | SSSXDDSSOOD | WV-2530 based, with | Exon 51 |
| | AAGAUG | | *SmGmAmU:mG*SfG*SfC*SfA* | | SSSSSSSS | PS2 after nucleotide | |
| | GCAUUU | | SfU*SfU*SfU*SfC*SfU | | | 11; two SfG * on 5′ | |
| | CU | | | | | wing converted to fG- | |
| | | | | | | PS2 | |
| WV-3083 | UCAAGG | 471 | fU*SfC*SfA*SfA*mG:mG:fA*Sf | 1223 | SSSXDDSSOOD | WV-2530 based, with | Exon 51 |
| | AAGAUG | | A*SmGmAmU:mG*SfG*SfC*Sf | | SSSSSSSS | PS2 after nucleotide | |
| | GCAUUU | | A*SfU*SfU*SfU*SfC*SfU | | | 11; two SfG * on 5′ | |
| | CU | | | | | wing converted to mG- | |
| | | | | | | PS2 | |
| WV-3084 | UCAAGG | 472 | Mod015L001mU*mC*mA*mA* | 1224 | OOXXXXXXXX | WV942 with C6 PO | Exon 51 |
| | AAGAUG | | mG*mG*mA*mA*mG*mA*mU* | | XXXXXXXXXX | and Stearic | |
| | GCAUUU | | mG*mG*mC*mA*mU*mU*mU* | | X | | |
| | CU | | mC*mU | | | | |
| WV-3085 | UCAAGG | 473 | Mod019L001mU*mC*mA*mA* | 1225 | OOXXXXXXXX | WV942 with C6 PO | Exon 51 |
| | AAGAUG | | mG*mG*mA*mA*mG*mA*mU* | | XXXXXXXXXX | and gamma-Linolenic | |
| | GCAUUU | | mG*mG*mC*mA*mU*mU*mU* | | X | | |
| | CU | | mC*mU | | | | |
| WV-3086 | UCAAGG | 474 | Mod020L001mU*mC*mA*mA* | 1226 | OOXXXXXXXX | WV942 with C6 PO | Exon 51 |
| | AAGAUG | | mG*mG*mA*mA*mG*mA*mU* | | XXXXXXXXXX | and Turbinaric | |
| | GCAUUU | | mG*mG*mC*mA*mU*mU*mU* | | X | | |
| | CU | | mC*mU | | | | |
| WV-3087 | UCAAGG | 475 | Mod015L001:mU*mC*mA*mA* | 1227 | ODXXXXXXXX | WV942 with C6 PS2 | Exon 51 |
| | AAGAUG | | mG*mG*mA*mA*mG*mA*mU* | | XXXXXXXXXX | and Stearic | |
| | GCAUUU | | mG*mG*mC*mA*mU*mU*mU* | | X | | |
| | CU | | mC*mU | | | | |
| WV-3088 | UCAAGG | 476 | Mod019L001:mU*mC*mA*mA* | 1228 | ODXXXXXXXX | WV942 with C6 PS2 | Exon 51 |
| | AAGAUG | | mG*mG*mA*mA*mG*mA*mU* | | XXXXXXXXXX | and gamma-Linolenic | |
| | GCAUUU | | mG*mG*mC*mA*mU*mU*mU* | | X | | |
| | CU | | mC*mU | | | | |
| WV-3089 | UCAAGG | 477 | Mod020L001:mU*mC*mA*mA* | 1229 | ODXXXXXXXX | WV942 with C6 PS2 | Exon 51 |
| | AAGAUG | | mG*mG*mA*mA*mG*mA*mU* | | XXXXXXXXXX | and Turbinaric | |
| | GCAUUU | | mG*mG*mC*mA*mU*mU*mU* | | X | | |
| | CU | | mC*mU | | | | |
| WV-3113 | UCAAGG | 478 | fU*SfC*SfA*SfA*SfG:fG:mAmA | 1230 | SSSSDDOOOOD | Variant of WV-3074. | Exon 51 |
| | AAGAUG | | mGmAmU:mGmGmC*SfA*SfU* | | OOSSSSSS | There was a randomer | |
| | GCAUUU | | SfU*SfU*SfC*SfU | | | PS in WV-3074 | |
| | CU | | | | | | |
| WV-3114 | UCAAGG | 479 | fU*SfC*SfA*SfA*SmG:mG:mA | 1231 | SSSSDDOOOOD | Variant of WV-3075. | Exon 51 |
| | AAGAUG | | mAmGmAmU:mGmGmC*SfA*S | | OOSSSSSS | There was a randomer | |
| | GCAUUU | | fU*SfU*SfU*SfC*SfU | | | PS in WV-3075 | |
| | CU | | | | | | |
| WV-3115 | UCAAGG | 480 | fU*SfC*SfA*SfA*SfG:fG:fA*Sm | 1232 | SSSSDDSOOOD | Variant of WV-3077. | Exon 51 |
| | AAGAUG | | AmGmAmU:mGmG*SfC*SfA*Sf | | OSSSSSSS | There was a randomer | |
| | GCAUUU | | U*SfU*SfU*SfC*SfU | | | PS in WV-3077 | |
| | CU | | | | | | |
| WV-3116 | UCAAGG | 481 | fU*SfC*SfA*SfA*SmG:mG:fA*S | 1233 | SSSSDDSOOOD | Variant of WV-3078. | Exon 51 |
| | AAGAUG | | mAmGmAmU:mGmG*SfC*SfA* | | OSSSSSSS | There was a randomer | |
| | GCAUUU | | SfU*SfU*SfU*SfC*SfU | | | PS in WV-3078 | |
| | CU | | | | | | |
| WV-3117 | UCAAGG | 482 | fU*SfC*SfA*SfA*SfG:fG:fA*Sf | 1234 | SSSSDDSSOOD | Variant of WV-3082. | Exon 51 |
| | AAGAUG | | A*SmGmAmU:mG*SfG*SfC*Sf | | SSSSSSSS | There was a randomer | |
| | GCAUUU | | A*SfU*SfU*SfU*SfC*SfU | | | PS in WV-3082 | |
| | CU | | | | | | |
| WV-3118 | UCAAGG | 483 | fU*SfC*SfA*SfA*SmG:mG:fA*S | 1235 | SSSSDDSSOOD | Variant of WV-3083. | Exon 51 |
| | AAGAUG | | fA*SmGmAmU:mG*SfG*SfC*Sf | | SSSSSSSS | There was a randomer | |
| | GCAUUU | | A*SfU*SfU*SfU*SfC*SfU | | | PS in WV-3083 | |
| | CU | | | | | | |
| WV-3120 | UCAAGG | 484 | fU*SfC*SfA*SfA*SfG*SfG*SfA | 1236 | SSSSSSSSSOOS | 9F-3OMe-8F 9Sp- | Exon 51 |
| | AAGAUG | | *SfA*SfG*SmAmUmG*SfG*SfC | | SSSSSSS | 2PO-8Sp | |
| | GCAUUU | | *SfA*SfU*SfU*SfU*SfC*SfU | | | | |
| | CU | | | | | | |
| WV-3121 | UCAAGG | 485 | fU*fC*fA*fA*fG*fG*fA*fA*fG* | 1237 | XXXXXXXXXO | 9F-3OMe-8F 9PS- | Exon 51 |
| | AAGAUG | | mAmUmG*fG*fC*fA*fU*fU*fU | | OXXXXXXXX | 2PO-8PS, randomer | |
| | GCAUUU | | *fC*fU | | | version of WV-3120 | |
| | CU | | | | | | |
| WV-3152 | UCAAGG | 486 | fU*SfC*SfA*SfA*SfG*SfG*SmA | 1238 | SSSSSSOSOSOS | WV-2438 modifed | DMD |
| | AAGAUG | | fA*SmGfA*SmUfG*SmGfC*SfA | | OSSSSSS | | |
| | GCAUUU | | *SfU*SfU*SfU*SfC*SfU | | | | |
| | CU | | | | | | |
| WV-3153 | UCAAGG | 487 | fU*SfC*SfA*SfA*SfG*SfG*SfA | 1239 | SSSSSSSSOSOS | WV-2529 modified | DMD |
| | AAGAUG | | *SfA*SmGfA*SmUfG*SmG*SfC | | SSSSSSS | | |
| | GCAUUU | | *SfA*SfU*SfU*SfU*SfC*SfU | | | | |
| | CU | | | | | | |
| WV-3357 | UCAAGG | 488 | L001mU*mC*mA*mA*mG*mG* | 1240 | OXXXXXXXXX | WV942 with C6 PO | Exon 51 |
| | AAGAUG | | mA*mA*mG*mA*mU*mG*mG* | | XXXXXXXXXX | linker | |
| | GCAUUU | | mC*mA*mU*mU*mU*mC*mU | | | | |
| | CU | | | | | | |
| WV-3358 | UCAAGG | 489 | L001fU*SfC*SfA*SfA*SfG*SfG | 1241 | OSSSSSSSSSOS | WV2531 with C6 PO | Exon 51 |
| | AAGAUG | | *SfA*SfA*SfG*SmAmU*SfG*Sf | | SSSSSSSS | linker | |
| | GCAUUU | | G*SfC*SfA*SfU*SfU*SfU*SfC* | | | | |
| | CU | | SfU | | | | |
| WV-3359 | UCAAGG | 490 | Mod013L001mU*mC*mA*mA* | 1242 | OOXXXXXXXX | PO linker, Lauric acid | Exon 51 |
| | AAGAUG | | mG*mG*mA*mA*mG*mA*mU* | | XXXXXXXXXX | WV942 with C6 amine | |
| | GCAUUU | | mG*mG*mC*mA*mU*mU*mU* | | X | | |
| | CU | | mC*mU | | | | |
| WV-3360 | UCAAGG | 491 | Mod013L001fU*SfC*SfA*SfA*S | 1243 | OOSSSSSSSSSO | WV2531 with C6 | Exon 51 |
| | AAGAUG | | fG*SfG*SfA*SfA*SfG*SmAmU* | | SSSSSSSSS | amine PO linker, | |
| | GCAUUU | | SfG*SfG*SfC*SfA*SfU*SfU*Sf | | | Lauric acid | |
| | CU | | U*SfC*SfU | | | | |
| WV-3361 | UCAAGG | 492 | Mod014L001fU*SfC*SfA*SfA*S | 1244 | OOSSSSSSSSSO | WV2531 with C6 | Exon 51 |
| | AAGAUG | | fG*SfG*SfA*SfA*SfG*SmAmU* | | SSSSSSSSS | amine PO linker, | |
| | GCAUUU | | SfG*SfG*SfC*SfA*SfU*SfU*Sf | | | Myristic acid | |
| | CU | | U*SfC*SfU | | | | |
| WV-3362 | UCAAGG | 493 | Mod005L001fU*SfC*SfA*SfA*S | 1245 | OOSSSSSSSSSO | WV2531 with C6 | Exon 51 |
| | AAGAUG | | fG*SfG*SfA*SfA*SfG*SmAmU* | | SSSSSSSSS | amine PO linker, | |
| | GCAUUU | | SfG*SfG*SfC*SfA*SfU*SfU*Sf | | | Palmitic acid | |
| | CU | | U*SfC*SfU | | | | |
| WV-3363 | UCAAGG | 494 | Mod015L001fU*SfC*SfA*SfA*S | 1246 | OOSSSSSSSSSO | WV2531 with C6 | Exon 51 |
| | AAGAUG | | fG*SfG*SfA*SfA*SfG*SmAmU* | | SSSSSSSSS | amine PO linker, | |
| | GCAUUU | | SfG*SfG*SfC*SfA*SfU*SfU*Sf | | | Stearic acid | |
| | CU | | U*SfC*SfU | | | | |
| WV-3364 | UCAAGG | 495 | Mod020L001fU*SfC*SfA*SfA*S | 1247 | OOSSSSSSSSSO | WV2531 with C6 | Exon 51 |
| | AAGAUG | | fG*SfG*SfA*SfA*SfG*SmAmU* | | SSSSSSSSS | amine PO linker, | |
| | GCAUUU | | SfG*SfG*SfC*SfA*SfU*SfU*Sf | | | Turbinaric acid | |
| | CU | | U*SfC*SfU | | | | |
| WV-3365 | UCAAGG | 496 | Mod027L001fU*SfC*SfA*SfA*S | 1248 | OOSSSSSSSSSO | WV2531 with C6 | Exon 51 |
| | AAGAUG | | fG*SfG*SfA*SfA*SfG*SmAmU* | | SSSSSSSSS | amine PO linker, | |
| | GCAUUU | | SfG*SfG*SfC*SfA*SfU*SfU*Sf | | | MonoSulfonamide | |
| | CU | | U*SfC*SfU | | | | |
| WV-3366 | UCAAGG | 497 | Mod029L001fU*SfC*SfA*SfA*S | 1249 | OOSSSSSSSSSO | WV2531 with C6 | Exon 51 |
| | AAGAUG | | fG*SfG*SfA*SfA*SfG*SmAmU* | | SSSSSSSSS | amine PO linker, | |
| | GCAUUU | | SfG*SfG*SfC*SfA*SfU*SfU*Sf | | | TriSulfonamide | |
| | CU | | U*SfC*SfU | | | | |
| WV-3463 | UCAAGG | 498 | fU*SfC*SfA*SfA*SfG*SfGfA*S | 1250 | SSSSSOSOSOSO | modifying WV-3152, | Exon 51 |
| | AAGAUG | | mAfG*SmAfU*SmGfGfC*SfA*S | | OSSSSSS | 2′f-U and Sp in the | |
| | GCAUUU | | fU*SfU*SfU*SfC*SfU | | | middle | |
| | CU | | | | | | |
| WV-3464 | UCAAGG | 499 | fU*SfC*SfA*SfA*SfG*SfG*SfA | 1251 | SSSSSSSOSOSS | modifying WV-3153, | Exon 51 |
| | AAGAUG | | *SfAfG*SmAfU*SmG*SmG*SfC | | SSSSSSS | 2′f-U and Sp in the | |
| | GCAUUU | | *SfA*SfU*SfU*SfU*SfC*SfU | | | middle | |
| | CU | | | | | | |
| WV-3465 | UCAAGG | 500 | fU*SfC*SfA*SfA*SfG*SfG*SfA | 1252 | SSSSSSSSSOSSS | modifying WV-2531, | Exon 51 |
| | AAGAUG | | *SfA*SfG*SmAfU*SmG*SfG*Sf | | SSSSSS | 2′f-U and Sp in the | |
| | GCAUUU | | C*SfA*SfU*SfU*SfU*SfC*SfU | | | middle | |
| | CU | | | | | | |
| WV-3466 | UCAAGG | 501 | fU*SfC*SfA*SfA*SfG*SfG*SfA | 1253 | SSSSSSSSOOSO | modifying WV-3028, | Exon 51 |
| | AAGAUG | | *SfA*SmGmAfU*SmGmG*SfC* | | SSSSSSS | 2′f-U and Sp in the | |
| | GCAUUU | | SfA*SfU*SfU*SfU*SfC*SfU | | | middle | |
| | CU | | | | | | |
| WV-3467 | UCAAGG | 502 | fU*SfC*SfA*SfA*SfG*SfG*SfA | 1254 | SSSSSSSSSOSO | modifying WV-3120, | Exon 51 |
| | AAGAUG | | *SfA*SfG*SmAfU*SmGfG*SfC* | | SSSSSSS | 2′f-U and Sp in the | |
| | GCAUUU | | SfA*SfU*SfU*SfU*SfC*SfU | | | middle | |
| | CU | | | | | | |
| WV-3468 | UCAAGG | 503 | fU*SfC*SfA*SfA*SfG*SfG*mA | 1255 | SSSSSXOOOOS | modifying WV-3046, | Exon 51 |
| | AAGAUG | | mAmGmAfU*SmGmG*SfC*SfA | | OSSSSSSS | 2′f-U and Sp in the | |
| | GCAUUU | | *SfU*SfU*SfU*SfC*SfU | | | middle | |
| | CU | | | | | | |
| WV-3469 | UCAAGG | 504 | fU*SfC*SfA*SfA*SfG*SfG*SmA | 1256 | SSSSSSSSSSSSS | modifying WV-3047, | Exon 51 |
| | AAGAUG | | *SmA*SmG*SmA*SfU*SmG*S | | SSSSSS | 2′f-U and Sp in the | |
| | GCAUUU | | mG*SfC*SfA*SfU*SfU*SfU*SfC | | | middle | |
| | CU | | *SfU | | | | |
| WV-3470 | UCAAGG | 505 | fU*SfC*SfA*SfA*SfG*SfG*SmA | 1257 | SSSSSSOSOSOS | 2′F on the middle U; | DMD |
| | AAGAUG | | fA*SmGfA*SfUfG*SmGfC*SfA* | | OSSSSSS | modified on | |
| | GCAUUU | | SfU*SfU*SfU*SfC*SfU | | | WV-3152 | |
| | CU | | | | | | |
| WV-3471 | UCAAGG | 506 | fU*SfC*SfA*SfA*SfG*SfG*SmA | 1258 | SSSSSSOSOSOO | 2′F on the middle U; | DMD |
| | AAGAUG | | fA*SmGfA*SfUmGmGfC*SfA*S | | OSSSSSS | modified on | |
| | GCAUUU | | fU*SfU*SfU*SfC*SfU | | | WV-3152 | |
| | CU | | | | | | |
| WV-3472 | UCAAGG | 507 | fU*SfC*SfA*SfA*SfG*SfG*SmA | 1259 | SSSSSSOSOSSO | 2′F on the middle U; | DMD |
| | AAGAUG | | fA*SmGfA*SfU*SmGmGfC*SfA | | OSSSSSS | modified on | |
| | GCAUUU | | *SfU*SfU*SfU*SfC*SfU | | | WV-3152 | |
| | CU | | | | | | |
| WV-3473 | UCAAGG | 508 | fU*SfC*SfA*SfA*SfG*SfG*SmA | 1260 | SSSSSSOSOSSO | 2′F on the middle U; | DMD |
| | AAGAUG | | fA*SmGmA*SfU*SmGmGfC*Sf | | OSSSSSS | modified on | |
| | GCAUUU | | A*SfU*SfU*SfU*SfC*SfU | | | WV-3152 | |
| | CU | | | | | | |
| WV-3506 | UCAAGG | 509 | fU*SfC*SfA*SfA*SfG*SfG*SmA | 1261 | SSSSSSOSOOSO | modifed on WV-3472; | Exon 51 |
| | AAGAUG | | fA*SmGfAfU*SmGmGfC*SfA*S | | OSSSSSS | except for PO linker | |
| | GCAUUU | | fU*SfU*SfU*SfC*SfU | | | between fA (10th nt) | |
| | CU | | | | | and fU (11th nt) | |
| WV-3507 | UCAAGG | 510 | fU*SfC*SfA*SfA*SfG*SfG*SmA | 1262 | SSSSSSOSOOSO | modifed on WV-3473; | Exon 51 |
| | AAGAUG | | fA*SmGmAfU*SmGmGfC*SfA* | | OSSSSSS | except for PO linker | |
| | GCAUUU | | SfU*SfU*SfU*SfC*SfU | | | between mA (10th nt) | |
| | CU | | | | | and fU (11th nt) | |
| WV-3508 | UCAAGG | 511 | fU*SfC*SfA*SfA*SfG*SfG*SmA | 1263 | SSSSSSOSOSSO | modifed on WV-3472; | Exon 51 |
| | AAGAUG | | fA*SmGfA*SfU*SmGmGfC*SfA | | OSOSSSS | except for PO linker | |
| | GCAUUU | | fU*SfU*SfU*SfC*SfU | | | between fA (15th nt) | |
| | CU | | | | | and fU (16th nt) | |
| WV-3509 | UCAAGG | 512 | fU*SfC*SfA*SfA*SfG*SfG*SmA | 1264 | SSSSSSOSOSSO | modifed on WV-3473; | Exon 51 |
| | AAGAUG | | fA*SmGmA*SfU*SmGmGfC*Sf | | OSOSSSS | except for PO linker | |
| | GCAUUU | | AfU*SfU*SfU*SfC*SfU | | | between fA (15th nt) | |
| | CU | | | | | and fU (16th nt) | |
| WV-3510 | UCAAGG | 513 | fU*SfC*SfA*SfA*SfG*SfG*SmA | 1265 | SSSSSSOSOOSO | modifed on WV-3472; | Exon 51 |
| | AAGAUG | | fA*SmGfAfU*SmGmGfC*SmA* | | OSSSSSS | except for mA on 15th | |
| | GCAUUU | | SfU*SfU*SfU*SfC*SfU | | | nt | |
| | CU | | | | | | |
| WV-3511 | UCAAGG | 514 | fU*SfC*SfA*SfA*SfG*SfG*SmA | 1266 | SSSSSSOSOOSO | modifed on WV-3473; | Exon 51 |
| | AAGAUG | | fA*SmGmAfU*SmGmGfC*SmA | | OSSSSSS | except for mA on 15th | |
| | GCAUUU | | *SfU*SfU*SfU*SfC*SfU | | | Int | |
| | CU | | | | | | |
| WV-3512 | UCAAGG | 515 | fU*SfC*SfA*SfA*SfG*SfG*SmA | 1267 | SSSSSSOSOOSO | modifed on WV-3472; | Exon 51 |
| | AAGAUG | | fA*SmGfAfU*SmGmGfC*SmAf | | OSOSSSS | except for PO linker | |
| | GCAUUU | | U*SfU*SfU*SfC*SfU | | | between fA (10th nt) | |
| | CU | | | | | and fU (11th nt); mA | |
| | | | | | | on 15th nt, and PO | |
| | | | | | | between mA (15th nt) | |
| | | | | | | and fU (16th nt) | |
| WV-3513 | UCAAGG | 516 | fU*SfC*SfA*SfA*SfG*SfG*SmA | 1268 | SSSSSSOSOOSO | modifed on WV-3472; | Exon 51 |
| | AAGAUG | | fA*SmGmAfU*SmGmGfC*SmAf | | OSOSSSS | except for PO linker | |
| | GCAUUU | | U*SfU*SfU*SfC*SfU | | | between mA (10th nt) | |
| | CU | | | | | and fU (11th nt); mA | |
| | | | | | | on 15th nt, and PO | |
| | | | | | | between mA (15th nt) | |
| | | | | | | and fU (16th nt) | |
| WV-3514 | UCAAGG | 517 | fU*SfC*SfA*SfA*SfG*SfG*SmA | 1269 | SSSSSSOSOOSO | modifed on WV-3472; | Exon 51 |
| | AAGAUG | | fA*SmGfAfU*SmGmGfC*SfAfU | | OSOSSSS | except for PO linker | |
| | GCAUUU | | *SfU*SfU*SfC*SfU | | | between fA (10th nt) | |
| | CU | | | | | and fU (11th nt); PO | |
| | | | | | | between fA (15th nt) | |
| | | | | | | and fU (16th nt) | |
| WV-3515 | UCAAGG | 518 | fU*SfC*SfA*SfA*SfG*SfG*SmA | 1270 | SSSSSSOSOOSO | modifed on WV-3472; | Exon 51 |
| | AAGAUG | | fA*SmGmAfU*SmGmGfC*SfAf | | OSOSSSS | except for PO linker | |
| | GCAUUU | | U*SfU*SfU*SfC*SfU | | | between mA (10th nt) | |
| | CU | | | | | and fU (11th nt); PO | |
| | | | | | | between fA (15th nt) | |
| | | | | | | and fU (16th nt) | |
| WV-3516 | UCAAGG | 519 | fU*fC*fA*fA*fG*fG*mAfA*mG | 1271 | XXXXXXOXOX | randomer version of | Exon 51 |
| | AAGAUG | | fA*mUfG*mGfC*fA*fU*fU*fU* | | OXOXXXXXX | WV-3152 | |
| | GCAUUU | | fC*fU | | | | |
| | CU | | | | | | |
| WV-3517 | UCAAGG | 520 | Mod030fU*fC*fA*fA*fG*fG*m | 1272 | OXXXXXXOXO | with PO linker, Lauric | Exon 51 |
| | AAGAUG | | AfA*mGfA*mUfG*mGfC*fA*fU | | XOXOXXXXXX | | |
| | GCAUUU | | *fU*fU*fC*fU | | | | |
| | CU | | | | | | |
| WV-3518 | UCAAGG | 521 | Mod031fU*fC*fA*fA*fG*fG*m | 1273 | OXXXXXXOXO | Myristic | Exon 51 |
| | AAGAUG | | AfA*mGfA*mUfG*mGfC*fA*fU | | XOXOXXXXXX | with PO linker, | |
| | GCAUUU | | *fU*fU*fC*fU | | | | |
| | CU | | | | | | |
| WV-3519 | UCAAGG | 522 | Mod032fU*fC*fA*fA*fG*fG*m | 1274 | OXXXXXXOXO | with PO linker, | Exon 51 |
| | AAGAUG | | AfA*mGfA*mUfG*mGfC*fA*fU | | XOXOXXXXXX | Palmitic | |
| | GCAUUU | | *fU*fU*fC*fU | | | | |
| | CU | | | | | | |
| WV-3520 | UCAAGG | 523 | Mod033fU*fC*fA*fA*fG*fG*m | 1275 | OXXXXXXOXO | with PO linker, Stearic | Exon 51 |
| | AAGAUG | | AfA*mGfA*mUfG*mGfC*fA*fU | | XOXOXXXXXX | | |
| | GCAUUU | | *fU*fU*fC*fU | | | | |
| | CU | | | | | | |
| WV-3543 | UCAAGG | 524 | Mod013L001fU*SfC*SfA*SfA*S | 1276 | OOSSSSSSOSOS | WV-3473, Lauric acid, | Exon 51 |
| | AAGAUG | | fG*SfG*SmAfA*SmGmA*SfU*S | | SOOSSSSSS | C6 PO linker | |
| | GCAUUU | | mGmGfC*SfA*SfU*SfU*SfU*Sf | | | | |
| | CU | | C*SfU | | | | |
| WV-3544 | UCAAGG | 525 | Mod005L001fU*SfC*SfA*SfA*S | 1277 | OOSSSSSSOSOS | WV-3473, Palmitic | Exon 51 |
| | AAGAUG | | fG*SfG*SmAfA*SmGmA*SfU*S | | SOOSSSSSS | acid, C6 PO linker | |
| | GCAUUU | | mGmGfC*SfA*SfU*SfU*SfU*Sf | | | | |
| | CU | | C*SfU | | | | |
| WV-3545 | UCAAGG | 526 | Mod015L001fU*SfC*SfA*SfA*S | 1278 | OOSSSSSSOSOS | WV-3473, Stearic | Exon 51 |
| | AAGAUG | | fG*SfG*SmAfA*SmGmA*SfU*S | | SOOSSSSSS | acid, C6 PO linker | |
| | GCAUUU | | mGmGfC*SfA*SfU*SfU*SfU*Sf | | | | |
| | CU | | C*SfU | | | | |
| WV-3546 | UCAAGG | 527 | Mod020L001fU*SfC*SfA*SfA*S | 1279 | OOSSSSSSOSOS | WV-3473, Turbinaric | Exon 51 |
| | AAGAUG | | fG*SfG*SmAfA*SmGmA*SfU*S | | SOOSSSSSS | acid, C6 PO linker | |
| | GCAUUU | | mGmGfC*SfA*SfU*SfU*SfU*Sf | | | | |
| | CU | | C*SfU | | | | |
| WV-3547 | UCAAGG | 528 | Mod027L001fU*SfC*SfA*SfA*S | 1280 | OOSSSSSSOSOS | WV-3473, | Exon 51 |
| | AAGAUG | | fG*SfG*SmAfA*SmGmA*SfU*S | | SOOSSSSSS | Monosulfonamide, C6 | |
| | GCAUUU | | mGmGfC*SfA*SfU*SfU*SfU*Sf | | | PO linker | |
| | CU | | C*SfU | | | | |
| WV-3548 | UCAAGG | 529 | Mod029L001fU*SfC*SfA*SfA*S | 1281 | OOSSSSSSOSOS | WV-3473, | Exon 51 |
| | AAGAUG | | fG*SfG*SmAfA*SmGmA*SfU*S | | SOOSSSSSS | Trisulfonamide, C6 | |
| | GCAUUU | | mGmGfC*SfA*SfU*SfU*SfU*Sf | | | PO linker | |
| | CU | | C*SfU | | | | |
| WV-3549 | UCAAGG | 530 | Mod030fU*SfC*SfA*SfA*SfG*S | 1282 | OSSSSSSOSOSS | WV-3473, Lauric, PO | Exon 51 |
| | AAGAUG | | fG*SmAfA*SmGmA*SfU*SmG | | OOSSSSSS | linker | |
| | GCAUUU | | mGfC*SfA*SfU*SfU*SfU*SfC*S | | | | |
| | CU | | fU | | | | |
| WV-3550 | UCAAGG | 531 | Mod032fU*SfC*SfA*SfA*SfG*S | 1283 | OSSSSSSOSOSS | WV-3473, Palmitic, | Exon 51 |
| | AAGAUG | | fG*SmAfA*SmGmA*SfU*SmG | | OOSSSSSS | PO linker | |
| | GCAUUU | | mGfC*SfA*SfU*SfU*SfU*SfC*S | | | | |
| | CU | | fU | | | | |
| WV-3551 | UCAAGG | 532 | Mod033fU*SfC*SfA*SfA*SfG*S | 1284 | OSSSSSSOSOSS | WV-3473, Stearic, PO | Exon 51 |
| | AAGAUG | | fG*SmAfA*SmGmA*SfU*SmG | | OOSSSSSS | linker | |
| | GCAUUU | | mGfC*SfA*SfU*SfU*SfU*SfC*S | | | | |
| | CU | | fU | | | | |
| WV-3552 | UCAAGG | 533 | Mod020L001*fU*SfC*SfA*SfA* | 1285 | OXSSSSSSOSOS | WV-3473, Turbinaric | Exon 51 |
| | AAGAUG | | SfG*SfG*SmAfA*SmGmA*SfU* | | SOOSSSSSS | acid, C6 PS linker | |
| | GCAUUU | | SmGmGfC*SfA*SfU*SfU*SfU*S | | | | |
| | CU | | fC*SfU | | | | |
| WV-3553 | UCAAGG | 534 | Mod005L001*fU*SfC*SfA*SfA* | 1286 | OXSSSSSSOSOS | WV-3473, Palmitic | Exon 51 |
| | AAGAUG | | SfG*SfG*SmAfA*SmGmA*SfU* | | SOOSSSSSS | acid, C6 PS linker | |
| | GCAUUU | | SmGmGfC*SfA*SfU*SfU*SfU*S | | | | |
| | CU | | fC*SfU | | | | |
| WV-3554 | UCAAGG | 535 | Mod014L001fU*SfC*SfA*SfA*S | 1287 | OOSSSSSSOSOS | WV-3473, Myristic | Exon 51 |
| | AAGAUG | | fG*SfG*SmAfA*SmGmA*SfU*S | | SOOSSSSSS | acid, C6 PO linker | |
| | GCAUUU | | mGmGfC*SfA*SfU*SfU*SfU*Sf | | | | |
| | CU | | C*SfU | | | | |
| WV-3555 | UCAAGG | 536 | Mod030*fU*SfC*SfA*SfA*SfG* | 1288 | XSSSSSSOSOSS | WV-3473, Lauric PS | Exon 51 |
| | AAGAUG | | SfG*SmAfA*SmGmA*SfU*SmG | | OOSSSSSS | linker | |
| | GCAUUU | | mGfC*SfA*SfU*SfU*SfU*SfC*S | | | | |
| | CU | | fU | | | | |
| WV-3556 | UCAAGG | 537 | Mod032*fU*SfC*SfA*SfA*SfG* | 1289 | XSSSSSSOSOSS | WV-3473, Palmitic PS | Exon 51 |
| | AAGAUG | | SfG*SmAfA*SmGmA*SfU*SmG | | OOSSSSSS | linker | |
| | GCAUUU | | mGfC*SfA*SfU*SfU*SfU*SfC*S | | | | |
| | CU | | fU | | | | |
| WV-3557 | UCAAGG | 538 | Mod033*fU*SfC*SfA*SfA*SfG* | 1290 | XSSSSSSOSOSS | WV-3473, Stearic PS | Exon 51 |
| | AAGAUG | | SfG*SmAfA*SmGmA*SfU*SmG | | OOSSSSSS | linker | |
| | GCAUUU | | mGfC*SfA*SfU*SfU*SfU*SfC*S | | | | |
| | CU | | fU | | | | |
| WV-3558 | UCAAGG | 539 | Mod033*fU*fC*fA*fA*fG*fG*m | 1291 | XXXXXXXOXO | with PS linker, Stearic | Exon 51 |
| | AAGAUG | | AfA*mGfA*mUfG*mGfC*fA*fU | | XOXOXXXXXX | linker | |
| | GCAUUU | | *fU*fU*fC*fU | | | | |
| | CU | | | | | | |
| WV-3559 | UCAAGG | 540 | Mod020L001fU*fC*fA*fA*fG*f | 1292 | OOXXXXXXOX | with C6 amine PO | Exon 51 |
| | AAGAUG | | G*mAfA*mGfA*mUfG*mGfC*f | | OXOXOXXXXX | linker, Turbinaric acid | |
| | GCAUUU | | A*fU*fU*fU*fC*fU | | X | | |
| | CU | | | | | | |
| WV-3560 | UCAAGG | 541 | Mod020L001*fU*fC*fA*fA*fG*f | 1293 | OXXXXXXXOX | with C6 amine PS | Exon 51 |
| | AAGAUG | | G*mAfA*mGfA*mUfG*mGfC*f | | OXOXOXXXXX | linker, Turbinaric acid | |
| | GCAUUU | | A*fU*fU*fU*fC*fU | | X | | |
| | CU | | | | | | |
| WV-3753 | UCAAGG | 542 | L001*fU*SfC*SfA*SfA*SfG*Sf | 1294 | XSSSSSSOSOSS | WV-3473, C6 PS | Exon 51 |
| | AAGAUG | | G*SmAfA*SmGmA*SfU*SmGm | | OOSSSSSS | linker | |
| | GCAUUU | | GfC*SfA*SfU*SfU*SfU*SfC*Sf | | | | |
| | CU | | U | | | | |
| WV-3754 | UCAAGG | 543 | L001fU*SfC*SfA*SfA*SfG*SfG | 1295 | OSSSSSSOSOSS | WV-3473, C6 PO | Exon 51 |
| | AAGAUG | | *SmAfA*SmGmA*SfU*SmGmG | | OOSSSSSS | linker | |
| | GCAUUU | | fC*SfA*SfU*SfU*SfU*SfC*SfU | | | | |
| | CU | | | | | | |
| WV-3812 | GCCAAC | 544 | rGrCrCrArArCrUrGrGrGrArGrCr | 1296 | OOOOOOOOOO | Complementary RNA | MSTN |
| | UGGGAG | | UrGrGrArGrCrGrCrArCrCrArAr | | OOOOOOOOOO | | |
| | CUGGAG | | CrCrArG | | OOOOOOOOO | | |
| | CGCACC | | | | | | |
| | AACCAG | | | | | | |
| WV-3820 | UCAAGG | 545 | L001*fU*fC*fA*fA*fG*fG*mAf | 1297 | XXXXXXXOXO | WV-3516, C6 PS | Exon 51 |
| | AAGAUG | | A*mGfA*mUfG*mGfC*fA*fU*f | | XOXOXXXXXX | linker | |
| | GCAUUU | | U*fU*fC*fU | | | | |
| | CU | | | | | | |
| WV-3821 | UCAAGG | 546 | L001fU*fC*fA*fA*fG*fG*mAfA | 1298 | OXXXXXXOXO | WV-3516, C6 PO | Exon 51 |
| | AAGAUG | | *mGfA*mUfG*mGfC*fA*fU*fU | | XOXOXXXXXX | linker | |
| | GCAUUU | | *fU*fC*fU | | | | |
| | CU | | | | | | |
| WV-3855 | UCAAGG | 547 | Mod015L001*fU*fC*fA*fA*fG*f | 1299 | OXXXXXXXOX | WV-3516, C6 PS | Exon 51 |
| | AAGAUG | | G*mAfA*mGfA*mUfG*mGfC*f | | OXOXOXXXXX | linker, Stearic acid | |
| | GCAUUU | | A*fU*fU*fU*fC*fU | | X | | |
| | CU | | | | | | |
| WV-3856 | UCAAGG | 548 | Mod015L001fU*fC*fA*fA*fG*f | 1300 | OOXXXXXXOX | WV-3516, C6 PO | Exon 51 |
| | AAGAUG | | G*mAfA*mGfA*mUfG*mGfC*f | | OXOXOXXXXX | linker, Stearic acid | |
| | GCAUUU | | A*fU*fU*fU*fC*fU | | X | | |
| | CU | | | | | | |
| WV-3975 | CCUUCC | 549 | fC*fC*fU*fU*fC*fC*mCfU*Gm | 1301 | XXXXXXOXOO | Negative control | NA |
| | CUGAAG | | AfA*mGmGfU*fU*fC*fC*fU*fC | | XOOXXXXXX | | |
| | GUUCCU | | *fC | | | | |
| | CC | | | | | | |
| WV-3976 | CCUUCC | 550 | L001fC*fC*fU*fU*fC*fC*mCfU | 1302 | OXXXXXXOXO | Negative control | NA |
| | CUGAAG | | *GmAfA*mGmGfU*fU*fC*fC*f | | OXOOXXXXXX | | |
| | GUUCCU | | U*fC*fC | | | | |
| | CC | | | | | | |
| WV-3977 | CCUUCC | 551 | Mod020L001fC*fC*fU*fU*fC*fC | 1303 | OOXXXXXXOX | Negative control | NA |
| | CUGAAG | | *mCfU*GmAfA*mGmGfU*fU*f | | OOXOOXXXXX | | |
| | GUUCCU | | C*fC*fU*fC*fC | | X | | |
| | ICC | | | | | | |
| WV-3978 | CCUUCC | 552 | fC*fC*fU*fU*fC*fC*mCfU*mG | 1304 | XXXXXXOXOO | Negative control | NA |
| | CUGAAG | | mAfA*mGmGfU*fU*fC*fC*fU*f | | XOOXXXXXX | | |
| | GUUCCU | | C*fC | | | | |
| | CC | | | | | | |
| WV-3979 | CCUUCC | 553 | L001fC*fC*fU*fU*fC*fC*mCfU | 1305 | OXXXXXXOXO | Negative control | NA |
| | CUGAAG | | *mGmAfA*mGmGfU*fU*fC*fC | | OXOOXXXXXX | | |
| | GUUCCU | | *fU*fC*fC | | | | |
| | CC | | | | | | |
| WV-3980 | CCUUCC | 554 | Mod020L001fC*fC*fU*fU*fC*fC | 1306 | OOXXXXXXOX | Negative control | NA |
| | CUGAAG | | *mCfU*mGmAfA*mGmGfU*fU | | OOXOOXXXXX | | |
| | GUUCCU | | *fC*fC*fU*fC*fC | | X | | |
| | CC | | | | | | |
| WV-4106 | UCAAGG | 555 | Mod015L001*fU*SfC*SfA*SfA* | 1307 | OXSSSSSSOSOS | WV-3473, C6 PS | Exon 51 |
| | AAGAUG | | SfG*SfG*SmAfA*SmGmA*SfU* | | SOOSSSSSS | linker, Stearic acid | |
| | GCAUUU | | SmGmGfC*SfA*SfU*SfU*SfU*S | | | | |
| | CU | | fC*SfU | | | | |
| WV-4107 | UCAAGG | 556 | Mod015L001*SfU*SfC*SfA*SfA | 1308 | OSSSSSSSOSOS | WV-3473, Sp | DMD |
| | AAGAUG | | *SfG*SfG*SmAfA*SmGmA*SfU | | SOOSSSSSS | stereopure C6 linker, | |
| | GCAUUU | | *SmGmGfC*SfA*SfU*SfU*SfU* | | | stearic acid | |
| | CU | | SfC*SfU | | | | |
| WV-4191 | UCAAGG | 557 | L001*SfU*SfC*SfA*SfA* | 1309 | SSSSSSSOSOSS | WV-3473, C6 and Sp | DMD |
| | AAGAUG | | SfG*SfG*SmAfA*SmGmA* | | OOSSSSSS | stereopure linker | |
| | GCAUUU | | SfU*SmGmGfC*SfA*SfU* | | | | |
| | CU | | SfU*SfU*SfC*SfU | | | | |
| WV-4231 | UCAAGG | 558 | fU*SfC*SfA*SfA*SfG*SfG*SmA | 1310 | SSSSSSOSOSSO | WV-3473 based, n-1 | DMD |
| | AAGAUG | | fA*SmGmA*SfU*SmGmGfC*Sf | | OSSSSS | on 3′ | |
| | GCAUUU | | A*SfU*SfU*SfU*SfC | | | | |
| | C | | | | | | |
| WV-4232 | UCAAGG | 559 | fU*SfC*SfA*SfA*SfG*SfG*SmA | 1311 | SSSSSSOSOSSO | WV-3473 based, n-2 | DMD |
| | AAGAUG | | fA*SmGmA*SfU*SmGmGfC*Sf | | OSSSS | on 3′ | |
| | GCAUUU | | A*SfU*SfU*SfU | | | | |
| WV-4233 | CAAGGA | 560 | fC*SfA*SfA*SfG*SfG*SmAfA*S | 1312 | SSSSSOSOSSOO | WV-3473 based, n-1 | DMD |
| | AGAUGG | | mGmA*SfU*SmGmGfC*SfA*Sf | | SSSSSS | on 5′ | |
| | CAUUUC | | U*SfU*SfU*SfC*SfU | | | | |
| | U | | | | | | |
| WV-4610 | GGCCAA | 561 | Mod020L001mG*mG*mC*mC* | 1313 | OOXXXXXXXX | WV-943, C6 linker | DMD mouse |
| | ACCUCG | | mA*mA*mA*mC*mC*mU*mC* | | XXXXXXXXXX | and PO, Turbinaric | Exon23 |
| | GCUUAC | | mG*mG*mC*mU*mU*mA*mC* | | X | acid | |
| | CU | | mC*mU | | | | |
| WV-4611 | GGCCAA | 562 | Mod015L001mG*mG*mC*mC* | 1314 | OOXXXXXXXX | WV-943, C6 linker | DMD mouse |
| | ACCUCG | | mA*mA*mA*mC*mC*mU*mC* | | XXXXXXXXXX | and PO, Stearic acid | Exon23 |
| | GCUUAC | | mG*mG*mC*mU*mU*mA*mC* | | X | | |
| | CU | | mC*mU | | | | |
| WV-4614 | UUCUGU | 563 | fU*fU*fC*fU*fG*fU*mA*mA*m | 1315 | XXXXXXXXXX | DMD mouse Exon23 | DMD |
| | AAGGUU | | G*mG*mU*mU*mU*mU*fU*fA | | XXXXXXXXX | | |
| | UUUAUG | | *fU*fG*fU*fG | | | | |
| | UG | | | | | | |
| WV-4615 | AUUUCU | 564 | fA*fU*fU*fU*fC*fU*mG*mU*m | 1316 | XXXXXXXXXX | DMD mouse Exon23 | DMD |
| | GUAAGG | | A*mA*mG*mG*mU*mU*fU*fU | | XXXXXXXXX | | |
| | UUUUUA | | *fU*fA*fU*fG | | | | |
| | UG | | | | | | |
| WV-4616 | CCAUUU | 565 | fC*fC*fA*fU*fU*fU*mC*mU*m | 1317 | XXXXXXXXXX | DMD mouse Exon23 | DMD |
| | CUGUAA | | G*mU*mA*mA*mG*mG*fU*fU | | XXXXXXXXX | | |
| | GGUUUU | | *fU*fU*fU*fA | | | | |
| | UA | | | | | | |
| WV-4617 | AUCCAU | 566 | fA*fU*fC*fC*fA*fU*mU*mU*m | 1318 | XXXXXXXXXX | DMD mouse Exon23 | DMD |
| | UUCUGU | | C*mU*mG*mU*mA*mA*fG*fG | | XXXXXXXXX | | |
| | AAGGUU | | *fU*fU*fU*fU | | | | |
| | UU | | | | | | |
| WV-4618 | CAUCCA | 567 | fC*fA*fU*fC*fC*fA*mU*mU*m | 1319 | XXXXXXXXXX | DMD mouse Exon23 | DMD |
| | UUUCUG | | U*mC*mU*mG*mU*mA*fA*fG | | XXXXXXXXX | | |
| | UAAGGU | | *fG*fU*fU*fU | | | | |
| | UU | | | | | | |
| WV-4619 | CCAUCC | 568 | fC*fC*fA*fU*fC*fC*mA*mU*m | 1320 | XXXXXXXXXX | DMD mouse Exon23 | DMD |
| | AUUUCU | | U*mU*mC*mU*mG*mU*fA*fA | | XXXXXXXXX | | |
| | GUAAGG | | *fG*fG*fU*fU | | | | |
| | UU | | | | | | |
| WV-4620 | GCCAUC | 569 | fG*fC*fC*fA*fU*fC*mC*mA*m | 1321 | XXXXXXXXXX | DMD mouse Exon23 | DMD |
| | CAUUUC | | U*mU*mU*mC*mU*mG*fU*fA | | XXXXXXXXX | | |
| | UGUAAG | | *fA*fG*fG*fU | | | | |
| | GU | | | | | | |
| WV-4621 | AGCCAU | 570 | fA*fG*fC*fC*fA*fU*mC*mC*m | 1322 | XXXXXXXXXX | DMD mouse Exon23 | DMD |
| | CCAUUU | | A*mU*mU*mU*mC*mU*fG*fU | | XXXXXXXXX | | |
| | CUGUAA | | *fA*fA*fG*fG | | | | |
| | GG | | | | | | |
| WV-4622 | CAGCCA | 571 | fC*fA*fG*fC*fC*fA*mU*mC*m | 1323 | XXXXXXXXXX | DMD mouse Exon23 | DMD |
| | UCCAUU | | C*mA*mU*mU*mU*mC*fU*fG | | XXXXXXXXX | | |
| | UCUGUA | | *fU*fA*fA*fG | | | | |
| | AG | | | | | | |
| WV-4623 | UCAGCC | 572 | fU*fC*fA*fG*fC*fC*mA*mU*m | 1324 | XXXXXXXXXX | DMD mouse Exon23 | DMD |
| | AUCCAU | | C*mC*mA*mU*mU*mU*fC*fU | | XXXXXXXXX | | |
| | UUCUGU | | *fG*fU*fA*fA | | | | |
| | AA | | | | | | |
| WV-4624 | UUCAGC | 573 | fU*fU*fC*fA*fG*fC*mC*mA*m | 1325 | XXXXXXXXXX | DMD mouse Exon23 | DMD |
| | CAUCCA | | U*mC*mC*mA*mU*mU*fU*fC | | XXXXXXXXX | | |
| | UUUCUG | | *fU*fG*fU*fA | | | | |
| | UA | | | | | | |
| WV-4625 | CUUCAG | 574 | fC*fU*fU*fC*fA*fG*mC*mC*m | 1326 | XXXXXXXXXX | DMD mouse Exon23 | DMD |
| | CCAUCC | | A*mU*mC*mC*mA*mU*fU*fU | | XXXXXXXXX | | |
| | AUUUCU | | *fC*fU*fG*fU | | | | |
| | GU | | | | | | |
| WV-4626 | ACUUCA | 575 | fA*fC*fU*fU*fC*fA*mG*mC*m | 1327 | XXXXXXXXXX | DMD mouse Exon23 | DMD |
| | GCCAUC | | C*mA*mU*mC*mC*mA*fU*fU | | XXXXXXXXX | | |
| | CAUUUC | | *fU*fC*fU*fG | | | | |
| | UG | | | | | | |
| WV-4627 | AACUUC | 576 | fA*fA*fC*fU*fU*fC*mA*mG*m | 1328 | XXXXXXXXXX | DMD mouse Exon23 | DMD |
| | AGCCAU | | C*mC*mA*mU*mC*mC*fA*fU* | | XXXXXXXXX | | |
| | CCAUUU | | fU*fU*fC*fU | | | | |
| | CU | | | | | | |
| WV-4628 | CAACUU | 577 | fC*fA*fA*fC*fU*fU*mC*mA*m | 1329 | XXXXXXXXXX | DMD mouse Exon23 | DMD |
| | CAGCCA | | G*mC*mC*mA*mU*mC*fC*fA* | | XXXXXXXXX | | |
| | UCCAUU | | fU*fU*fU*fC | | | | |
| | UC | | | | | | |
| WV-4629 | UCAACU | 578 | fU*fC*fA*fA*fC*fU*mU*mC*m | 1330 | XXXXXXXXXX | DMD mouse Exon23 | DMD |
| | UCAGCC | | A*mG*mC*mC*mA*mU*fC*fC* | | XXXXXXXXX | | |
| | AUCCAU | | fA*fU*fU*fU | | | | |
| | UU | | | | | | |
| WV-4630 | AUCAAC | 579 | fA*fU*fC*fA*fA*fC*mU*mU*m | 1331 | XXXXXXXXXX | DMD mouse Exon23 | DMD |
| | UUCAGC | | C*mA*mG*mC*mC*mA*fU*fC* | | XXXXXXXXX | | |
| | CAUCCA | | fC*fA*fU*fU | | | | |
| | UU | | | | | | |
| WV-4631 | CAUCAA | 580 | fC*fA*fU*fC*fA*fA*mC*mU*m | 1332 | XXXXXXXXXX | DMD mouse Exon23 | DMD |
| | CUUCAG | | U*mC*mA*mG*mC*mC*fA*fU | | XXXXXXXXX | | |
| | CCAUCC | | *fC*fC*fA*fU | | | | |
| | AU | | | | | | |
| WV-4632 | ACAUCA | 581 | fA*fC*fA*fU*fC*fA*mA*mC*m | 1333 | XXXXXXXXXX | DMD mouse Exon23 | DMD |
| | ACUUCA | | U*mU*mC*mA*mG*mC*fC*fA | | XXXXXXXXX | | |
| | GCCAUC | | *fU*fC*fC*fA | | | | |
| | CA | | | | | | |
| WV-4633 | AACAUC | 582 | fA*fA*fC*fA*fU*fC*mA*mA*m | 1334 | XXXXXXXXXX | DMD mouse Exon23 | DMD |
| | AACUUC | | C*mU*mU*mC*mA*mG*fC*fC* | | XXXXXXXXX | | |
| | AGCCAU | | fA*fU*fC*fC | | | | |
| | CC | | | | | | |
| WV-4634 | GAAAAC | 583 | fG*fA*fA*fA*fA*fC*mA*mU*m | 1335 | XXXXXXXXXX | DMD mouse Exon23 | DMD |
| | AUCAAC | | C*mA*mA*mC*mU*mU*fC*fA | | XXXXXXXXX | | |
| | UUCAGC | | *fG*fC*fC*fA | | | | |
| | CA | | | | | | |
| WV-4635 | CAGGAA | 584 | fC*fA*fG*fG*fA*fA*mA*mA*m | 1336 | XXXXXXXXXX | DMD mouse Exon23 | DMD |
| | AACAUC | | C*mA*mU*mC*mA*mA*fC*fU | | XXXXXXXXX | | |
| | AACUUC | | *fU*fC*fA*fG | | | | |
| | AG | | | | | | |
| WV-4636 | UUUCAG | 585 | fU*fU*fU*fC*fA*fG*mG*mA*m | 1337 | XXXXXXXXXX | DMD mouse Exon23 | DMD |
| | GAAAAC | | A*mA*mA*mC*mA*mU*fC*fA | | XXXXXXXXX | | |
| | AUCAAC | | *fA*fC*fU*fU | | | | |
| | UU | | | | | | |
| WV-4637 | CUCUUU | 586 | fC*fU*fC*fU*fU*fU*mC*mA*m | 1338 | XXXXXXXXXX | DMD mouse Exon23 | DMD |
| | CAGGAA | | G*mG*mA*mA*mA*mA*fC*fA | | XXXXXXXXX | | |
| | AACAUC | | *fU*fC*fA*fA | | | | |
| | AA | | | | | | |
| WV-4638 | UUCCUC | 587 | fU*fU*fC*fC*fU*fC*mU*mU*m | 1339 | XXXXXXXXXX | DMD mouse Exon23 | DMD |
| | UUUCAG | | UmC*mA*mG*mG*mA*fA*fA | | XXXXXXXXX | | |
| | GAAAAC | | *fA*fC*fA*fU | | | | |
| | AU | | | | | | |
| WV-4639 | GCCAUU | 588 | fG*fC*fC*fA*fU*fU*mC*mC*m | 1340 | XXXXXXXXXX | DMD mouse Exon23 | DMD |
| | CCUCUU | | U*mC*mU*mU*mU*mC*fA*fG | | XXXXXXXXX | | |
| | UCAGGA | | *fG*fA*fA*fA | | | | |
| | AA | | | | | | |
| WV-4640 | GGCCAU | 589 | fG*fG*fC*fC*fA*fU*mU*mC*m | 1341 | XXXXXXXXXX | DMD mouse Exon23 | DMD |
| | UCCUCU | | C*mU*mC*mU*mU*mU*fC*fA | | XXXXXXXXX | | |
| | UUCAGG | | *fG*fG*fA*fA | | | | |
| | AA | | | | | | |
| WV-4641 | AGGCCA | 590 | fA*fG*fG*fC*fC*fA*mU*mU*m | 1342 | XXXXXXXXXX | DMD mouse Exon23 | DMD |
| | UUCCUC | | C*mC*mU*mC*mU*mU*fU*fC* | | XXXXXXXXX | | |
| | UUUCAG | | fA*fG*fG*fA | | | | |
| | GA | | | | | | |
| WV-4642 | CAGGCC | 591 | fC*fA*fG*fG*fC*fC*mA*mU*m | 1343 | XXXXXXXXXX | DMD mouse Exon23 | DMD |
| | AUUCCU | | U*mC*mC*mU*mC*mU*fU*fU | | XXXXXXXXX | | |
| | CUUUCA | | *fC*fA*fG*fG | | | | |
| | GG | | | | | | |
| WV-4643 | GCAGGC | 592 | fG*fC*fA*fG*fG*fC*mC*mA*m | 1344 | XXXXXXXXXX | DMD mouse Exon23 | DMD |
| | CAUUCC | | U*mU*mC*mC*mU*mC*fU*fU | | XXXXXXXXX | | |
| | UCUUUC | | *fU*fC*fA*fG | | | | |
| | AG | | | | | | |
| WV-4644 | GGCAGG | 593 | fG*fG*fC*fA*fG*fG*mC*mC*m | 1345 | XXXXXXXXXX | DMD mouse Exon23 | DMD |
| | CCAUUC | | A*mU*mU*mC*mC*mU*fC*fU | | XXXXXXXXX | | |
| | CUCUUU | | *fU*fU*fC*fA | | | | |
| | CA | | | | | | |
| WV-4645 | GGGCAG | 594 | fG*fG*fG*fC*fA*fG*mG*mC*m | 1346 | XXXXXXXXXX | DMD mouse Exon23 | DMD |
| | GCCAUU | | C*mA*mU*mU*mC*mC*fU*fC* | | XXXXXXXXX | | |
| | CCUCUU | | fU*fU*fU*fC | | | | |
| | UC | | | | | | |
| WV-4646 | AGGGCA | 595 | fA*fG*fG*fG*fC*fA*mG*mG*m | 1347 | XXXXXXXXXX | DMD mouse Exon23 | DMD |
| | GGCCAU | | C*mC*mA*mU*mU*mC*fC*fU* | | XXXXXXXXX | | |
| | UCCUCU | | fC*fU*fU*fU | | | | |
| | UU | | | | | | |
| WV-4647 | CAGGGC | 596 | fC*fA*fG*fG*fG*fC*mA*mG*m | 1348 | XXXXXXXXXX | DMD mouse Exon23 | DMD |
| | AGGCCA | | G*mC*mC*mA*mU*mU*fC*fC* | | XXXXXXXXX | | |
| | UUCCUC | | fU*fC*fU*fU | | | | |
| | UU | | | | | | |
| WV-4648 | CCAGGG | 597 | fC*fC*fA*fG*fG*fG*mC*mA*m | 1349 | XXXXXXXXXX | DMD mouse Exon23 | DMD |
| | CAGGCC | | G*mG*mC*mC*mA*mU*fU*fC | | XXXXXXXXX | | |
| | AUUCCU | | *fC*fU*fC*fU | | | | |
| | CU | | | | | | |
| WV-4649 | CCCAGG | 598 | fC*fC*fC*fA*fG*fG*mG*mC*m | 1350 | XXXXXXXXXX | DMD mouse Exon23 | DMD |
| | GCAGGC | | A*mG*mG*mC*mC*mA*fU*fU | | XXXXXXXXX | | |
| | CAUUCC | | *fC*fC*fU*fC | | | | |
| | UC | | | | | | |
| WV-4650 | CCCCAG | 599 | fC*fC*fC*fC*fA*fG*mG*mG*m | 1351 | XXXXXXXXXX | DMD mouse Exon23 | DMD |
| | GGCAGG | | C*mA*mG*mG*mC*mC*fA*fU | | XXXXXXXXX | | |
| | CCAUUC | | *fU*fC*fC*fU | | | | |
| | CU | | | | | | |
| WV-4651 | CCCCCA | 600 | fC*fC*fC*fC*fC*fA*mG*mG*m | 1352 | XXXXXXXXXX | DMD mouse Exon23 | DMD |
| | GGGCAG | | G*mC*mA*mG*mG*mC*fC*fA | | XXXXXXXXX | | |
| | GCCAUU | | *fU*fU*fC*fC | | | | |
| | CC | | | | | | |
| WV-4652 | UCCCCC | 601 | fU*fC*fC*fC*fC*fC*mA*mG*m | 1353 | XXXXXXXXXX | DMD mouse Exon23 | DMD |
| | AGGGCA | | G*mG*mC*mA*mG*mG*fC*fC | | XXXXXXXXX | | |
| | GGCCAU | | *fA*fU*fU*fC | | | | |
| | UC | | | | | | |
| WV-4653 | AUCCCC | 602 | fA*fU*fC*fC*fC*fC*mC*mA*m | 1354 | XXXXXXXXXX | DMD mouse Exon23 | DMD |
| | CAGGGC | | G*mG*mG*mC*mA*mG*fG*fC | | XXXXXXXXX | | |
| | AGGCCA | | *fC*fA*fU*fU | | | | |
| | UU | | | | | | |
| WV-4654 | CAUCCC | 603 | fC*fA*fU*fC*fC*fC*mC*mC*m | 1355 | XXXXXXXXXX | DMD mouse Exon23 | DMD |
| | CCAGGG | | A*mG*mG*mG*mC*mA*fG*fG | | XXXXXXXXX | | |
| | CAGGCC | | *fC*fC*fA*fU | | | | |
| | AU | | | | | | |
| WV-4655 | GCAUCC | 604 | fG*fC*fA*fU*fC*fC*mC*mC*m | 1356 | XXXXXXXXXX | DMD mouse Exon23 | DMD |
| | CCCAGG | | C*mA*mG*mG*mG*mC*fA*fG | | XXXXXXXXX | | |
| | GCAGGC | | *fG*fC*fC*fA | | | | |
| | CA | | | | | | |
| WV-4656 | AGCAUC | 605 | fA*fG*fC*fA*fU*fC*mC*mC*m | 1357 | XXXXXXXXXX | DMD mouse Exon23 | DMD |
| | CCCCAG | | C*mC*mA*mG*mG*mG*fC*fA | | XXXXXXXXX | | |
| | GGCAGG | | *fG*fG*fC*fC | | | | |
| | CC | | | | | | |
| WV-4657 | CAGCAU | 606 | fC*fA*fG*fC*fA*fU*mC*mC*m | 1358 | XXXXXXXXXX | DMD mouse Exon23 | DMD |
| | CCCCCA | | C*mC*mC*mA*mG*mG*fG*fC* | | XXXXXXXXX | | |
| | GGGCAG | | fA*fG*fG*fC | | | | |
| | GC | | | | | | |
| WV-4658 | UCAGCA | 607 | fU*fC*fA*fG*fC*fA*mU*mC*m | 1359 | XXXXXXXXXX | DMD mouse Exon23 | DMD |
| | UCCCCC | | C*mC*mC*mC*mA*mG*fG*fG* | | XXXXXXXXX | | |
| | AGGGCA | | fC*fA*fG*fG | | | | |
| | GG | | | | | | |
| WV-4659 | UUCAGC | 608 | fU*fU*fC*fA*fG*fC*mA*mU*m | 1360 | XXXXXXXXXX | DMD mouse Exon23 | DMD |
| | AUCCCC | | C*mC*mC*mC*mC*mA*fG*fG* | | XXXXXXXXX | | |
| | CAGGGC | | fG*fC*fA*fG | | | | |
| | AG | | | | | | |
| WV-4660 | UUUCAG | 609 | fU*fU*fU*fC*fA*fG*mC*mA*m | 1361 | XXXXXXXXXX | DMD mouse Exon23 | DMD |
| | CAUCCC | | U*mC*mC*mC*mC*mC*fA*fG* | | XXXXXXXXX | | |
| | CCAGGG | | fG*fG*fC*fA | | | | |
| | CA | | | | | | |
| WV-4661 | AUUUCA | 610 | fA*fU*fU*fU*fC*fA*mG*mC*m | 1362 | XXXXXXXXXX | DMD mouse Exon23 | DMD |
| | GCAUCC | | A*mU*mC*mC*mC*mC*fC*fA* | | XXXXXXXXX | | |
| | CCCAGG | | fG*fG*fG*fC | | | | |
| | GC | | | | | | |
| WV-4662 | GAUUUC | 611 | fG*fA*fU*fU*fU*fC*mA*mG*m | 1363 | XXXXXXXXXX | DMD mouse Exon23 | DMD |
| | AGCAUC | | C*mA*mU*mC*mC*mC*fC*fC* | | XXXXXXXXX | | |
| | CCCCAG | | fA*fG*fG*fG | | | | |
| | GG | | | | | | |
| WV-4663 | GGAUUU | 612 | fG*fG*fA*fU*fU*fU*mC*mA*m | 1364 | XXXXXXXXXX | DMD mouse Exon23 | DMD |
| | CAGCAU | | G*mC*mA*mU*mC*mC*fC*fC* | | XXXXXXXXX | | |
| | CCCCCA | | fC*fA*fG*fG | | | | |
| | GG | | | | | | |
| WV-4664 | AGGAUU | 613 | fA*fG*fG*fA*fU*fU*mU*mC*m | 1365 | XXXXXXXXXX | DMD mouse Exon23 | DMD |
| | UCAGCA | | A*mG*mC*mA*mU*mC*fC*fC* | | XXXXXXXXX | | |
| | UCCCCC | | fC*fC*fA*fG | | | | |
| | AG | | | | | | |
| WV-4665 | CAGGAU | 614 | fC*fA*fG*fG*fA*fU*mU*mU*m | 1366 | XXXXXXXXXX | DMD mouse Exon23 | DMD |
| | UUCAGC | | C*mA*mG*mC*mA*mU*fC*fC* | | XXXXXXXXX | | |
| | AUCCCC | | fC*fC*fC*fA | | | | |
| | CA | | | | | | |
| WV-4666 | UCAGGA | 615 | fU*fC*fA*fG*fG*fA*mU*mU*m | 1367 | XXXXXXXXXX | DMD mouse Exon23 | DMD |
| | UUUCAG | | U*mC*mA*mG*mC*mA*fU*fC | | XXXXXXXXX | | |
| | CAUCCC | | *fC*fC*fC*fC | | | | |
| | CC | | | | | | |
| WV-4667 | UUCAGG | 616 | fU*fU*fC*fA*fG*fG*mA*mU*m | 1368 | XXXXXXXXXX | DMD mouse Exon23 | DMD |
| | AUUUCA | | U*mU*mC*mA*mG*mC*fA*fU | | XXXXXXXXX | | |
| | GCAUCC | | *fC*fC*fC*fC | | | | |
| | CC | | | | | | |
| WV-4668 | UUUCAG | 617 | fU*fU*fU*fC*fA*fG*mG*mA*m | 1369 | XXXXXXXXXX | DMD mouse Exon23 | DMD |
| | GAUUUC | | U*mU*mU*mC*mA*mG*fC*fA | | XXXXXXXXX | | |
| | AGCAUC | | *fU*fC*fC*fC | | | | |
| | CC | | | | | | |
| WV-4669 | UUUUCA | 618 | fU*fU*fU*fU*fC*fA*mG*mG*m | 1370 | XXXXXXXXXX | DMD mouse Exon23 | DMD |
| | GGAUUU | | A*mU*mU*mU*mC*mA*fG*fC | | XXXXXXXXX | | |
| | CAGCAU | | *fA*fU*fC*fC | | | | |
| | CC | | | | | | |
| WV-4670 | UUUUUC | 619 | fU*fU*fU*fU*fU*fC*mA*mG*m | 1371 | XXXXXXXXXX | DMD mouse Exon23 | DMD |
| | AGGAUU | | G*mA*mU*mU*mU*mC*fA*fG | | XXXXXXXXX | | |
| | UCAGCA | | *fC*fA*fU*fC | | | | |
| | UC | | | | | | |
| WV-4671 | UUUUUU | 620 | fU*fU*fU*fU*fU*fU*mC*mA*m | 1372 | XXXXXXXXXX | DMD mouse Exon23 | DMD |
| | CAGGAU | | G*mG*mA*mU*mU*mU*fC*fA | | XXXXXXXXX | | |
| | UUCAGC | | *fG*fC*fA*fU | | | | |
| | AU | | | | | | |
| WV-4672 | GUUUUU | 621 | fG*fU*fU*fU*fU*fU*mU*mC*m | 1373 | XXXXXXXXXX | DMD mouse Exon23 | DMD |
| | UCAGGA | | A*mG*mG*mA*mU*mU*fU*fC | | XXXXXXXXX | | |
| | UUUCAG | | *fA*fG*fC*fA | | | | |
| | CA | | | | | | |
| WV-4673 | UGUUUU | 622 | fU*fG*fU*fU*fU*fU*mU*mU*m | 1374 | XXXXXXXXXX | DMD mouse Exon23 | DMD |
| | UUCAGG | | C*mA*mG*mG*mA*mU*fU*fU | | XXXXXXXXX | | |
| | AUUUCA | | *fC*fA*fG*fC | | | | |
| | GC | | | | | | |
| WV-4674 | CUGUUU | 623 | fC*fU*fG*fU*fU*fU*mU*mU*m | 1375 | XXXXXXXXXX | DMD mouse Exon23 | DMD |
| | UUUCAG | | U*mC*mA*mG*mG*mA*fU*fU | | XXXXXXXXX | | |
| | GAUUUC | | *fU*fC*fA*fG | | | | |
| | AG | | | | | | |
| WV-4675 | GCUGUU | 624 | fG*fC*fU*fG*fU*fU*mU*mU*m | 1376 | XXXXXXXXXX | DMD mouse Exon23 | DMD |
| | UUUUCA | | U*mU*mC*mA*mG*mG*fA*fU | | XXXXXXXXX | | |
| | GGAUUU | | *fU*fU*fC*fA | | | | |
| | CA | | | | | | |
| WV-4676 | AGCUGU | 625 | fA*fG*fC*fU*fG*fU*mU*mU*m | 1377 | XXXXXXXXXX | DMD mouse Exon23 | DMD |
| | UUUUUC | | U*mU*mU*mC*mA*mG*fG*fA | | XXXXXXXXX | | |
| | AGGAUU | | *fU*fU*fU*fC | | | | |
| | UC | | | | | | |
| WV-4677 | GAGCUG | 626 | fG*fA*fG*fC*fU*fG*mU*mU*m | 1378 | XXXXXXXXXX | DMD mouse Exon23 | DMD |
| | UUUUUU | | U*mU*mU*mU*mC*mA*fG*fG | | XXXXXXXXX | | |
| | CAGGAU | | *fA*fU*fU*fU | | | | |
| | UU | | | | | | |
| WV-4678 | UGAGCU | 627 | fU*fG*fA*fG*fC*fU*mG*mU*m | 1379 | XXXXXXXXXX | DMD mouse Exon23 | DMD |
| | GUUUUU | | U*mU*mU*mU*mU*mC*fA*fG | | XXXXXXXXX | | |
| | UCAGGA | | *fG*fA*fU*fU | | | | |
| | UU | | | | | | |
| WV-4679 | UUGAGC | 628 | fU*fU*fG*fA*fG*fC*mU*mG*m | 1380 | XXXXXXXXXX | DMD mouse Exon23 | DMD |
| | UGUUUU | | U*mU*mU*mU*mU*mU*fC*fA | | XXXXXXXXX | | |
| | UUCAGG | | *fG*fG*fA*fU | | | | |
| | AU | | | | | | |
| WV-4680 | UUUGAG | 629 | fU*fU*fU*fG*fA*fG*mC*mU*m | 1381 | XXXXXXXXXX | DMD mouse Exon23 | DMD |
| | CUGUUU | | G*mU*mU*mU*mU*mU*fU*fC | | XXXXXXXXX | | |
| | UUUCAG | | *fA*fG*fG*fA | | | | |
| | GA | | | | | | |
| WV-4681 | GUUUGA | 630 | fG*fU*fU*fU*fG*fA*mG*mC*m | 1382 | XXXXXXXXXX | DMD mouse Exon23 | DMD |
| | GCUGUU | | U*mG*mU*mU*mU*mU*fU*fU | | XXXXXXXXX | | |
| | UUUUCA | | *fC*fA*fG*fG | | | | |
| | GG | | | | | | |
| WV-4682 | UUGUUU | 631 | fU*fU*fG*fU*fU*fU*mG*mA*m | 1383 | XXXXXXXXXX | DMD mouse Exon23 | DMD |
| | GAGCUG | | G*mC*mU*mG*mU*mU*fU*fU | | XXXXXXXXX | | |
| | UUUUUU | | *fU*fU*fC*fA | | | | |
| | CA | | | | | | |
| WV-4683 | CAUUGU | 632 | fC*fA*fU*fU*fG*fU*mU*mU*m | 1384 | XXXXXXXXXX | DMD mouse Exon23 | DMD |
| | UUGAGC | | G*mA*mG*mC*mU*mG*fU*fU | | XXXXXXXXX | | |
| | UGUUUU | | *fU*fU*fU*fU | | | | |
| | UU | | | | | | |
| WV-4684 | GCAUUG | 633 | fG*fC*fA*fU*fU*fG*mU*mU*m | 1385 | XXXXXXXXXX | DMD mouse Exon23 | DMD |
| | UUUGAG | | U*mG*mA*mG*mC*mU*fG*fU | | XXXXXXXXX | | |
| | CUGUUU | | *fU*fU*fU*fU | | | | |
| | UU | | | | | | |
| WV-4685 | UGCAUU | 634 | fU*fG*fC*fA*fU*fU*mG*mU*m | 1386 | XXXXXXXXXX | DMD mouse Exon23 | DMD |
| | GUUUGA | | U*mU*mG*mA*mG*mC*fU*fG | | XXXXXXXXX | | |
| | GCUGUU | | *fU*fU*fU*fU | | | | |
| | UU | | | | | | |
| WV-4686 | CUGCAU | 635 | fC*fU*fG*fC*fA*fU*mU*mG*m | 1387 | XXXXXXXXXX | DMD mouse Exon23 | DMD |
| | UGUUUG | | U*mU*mU*mG*mA*mG*fC*fU | | XXXXXXXXX | | |
| | AGCUGU | | *fG*fU*fU*fU | | | | |
| | UU | | | | | | |
| WV-4687 | UCUGCA | 636 | fU*fC*fU*fG*fC*fA*mU*mU*m | 1388 | XXXXXXXXXX | DMD mouse Exon23 | DMD |
| | UUGUUU | | G*mU*mU*mU*mG*mA*fG*fC | | XXXXXXXXX | | |
| | GAGCUG | | *fU*fG*fU*fU | | | | |
| | UU | | | | | | |
| WV-4688 | CUCUGC | 637 | fC*fU*fC*fU*fG*fC*mA*mU*m | 1389 | XXXXXXXXXX | DMD mouse Exon23 | DMD |
| | AUUGUU | | U*mG*mU*mU*mU*mG*fA*fG | | XXXXXXXXX | | |
| | UGAGCU | | *fC*fU*fG*fU | | | | |
| | GU | | | | | | |
| WV-4689 | ACUCUG | 638 | fA*fC*fU*fC*fU*fG*mC*mA*m | 1390 | XXXXXXXXXX | DMD mouse Exon23 | DMD |
| | CAUUGU | | U*mU*mG*mU*mU*mU*fG*fA | | XXXXXXXXX | | |
| | UUGAGC | | *fG*fC*fU*fG | | | | |
| | UG | | | | | | |
| WV-4690 | UACUCU | 639 | fU*fA*fC*fU*fC*fU*mG*mC*m | 1391 | XXXXXXXXXX | DMD mouse Exon23 | DMD |
| | GCAUUG | | A*mU*mU*mG*mU*mU*fU*fG | | XXXXXXXXX | | |
| | UUUGAG | | *fA*fG*fC*fU | | | | |
| | CU | | | | | | |
| WV-4691 | UUACUC | 640 | fU*fU*fA*fC*fU*fC*mU*mG*m | 1392 | XXXXXXXXXX | DMD mouse Exon23 | DMD |
| | UGCAUU | | C*mA*mU*mU*mG*mU*fU*fU | | XXXXXXXXX | | |
| | GUUUGA | | *fG*fA*fG*fC | | | | |
| | GC | | | | | | |
| WV-4692 | CUUACU | 641 | fC*fU*fU*fA*fC*fU*mC*mU*m | 1393 | XXXXXXXXXX | DMD mouse Exon23 | DMD |
| | CUGCAU | | G*mC*mA*mU*mU*mG*fU*fU | | XXXXXXXXX | | |
| | UGUUUG | | *fU*fG*fA*fG | | | | |
| | AG | | | | | | |
| WV-4693 | UCUUAC | 642 | fU*fC*fU*fU*fA*fC*mU*mC*m | 1394 | XXXXXXXXXX | DMD mouse Exon23 | DMD |
| | UCUGCA | | U*mG*mC*mA*mU*mU*fG*fU | | XXXXXXXXX | | |
| | UUGUUU | | *fU*fU*fG*fA | | | | |
| | GA | | | | | | |
| WV-4694 | AUCUUA | 643 | fA*fU*fC*fU*fU*fA*mC*mU*m | 1395 | XXXXXXXXXX | DMD mouse Exon23 | DMD |
| | CUCUGC | | C*mU*mG*mC*mA*mU*fU*fG | | XXXXXXXXX | | |
| | AUUGUU | | *fU*fU*fU*fG | | | | |
| | UG | | | | | | |
| WV-4695 | AAUCUU | 644 | fA*fA*fU*fC*fU*fU*mA*mC*m | 1396 | XXXXXXXXXX | DMD mouse Exon23 | DMD |
| | ACUCUG | | U*mC*mU*mG*mC*mA*fU*fU | | XXXXXXXXX | | |
| | CAUUGU | | *fG*fU*fU*fU | | | | |
| | UU | | | | | | |
| WV-4696 | CAAAUC | 645 | fC*fA*fA*fA*fU*fC*mU*mU*m | 1397 | XXXXXXXXXX | DMD mouse Exon23 | DMD |
| | UUACUC | | A*mC*mU*mC*mU*mG*fC*fA | | XXXXXXXXX | | |
| | UGCAUU | | *fU*fU*fG*fU | | | | |
| | GU | | | | | | |
| WV-4697 | GAUACA | 646 | fG*fA*fU*fA*fC*fA*mA*mA*m | 1398 | XXXXXXXXXX | DMD mouse Exon23 | DMD |
| | AAUCUU | | U*mC*mU*mU*mA*mC*fU*fC | | XXXXXXXXX | | |
| | ACUCUG | | *fU*fG*fC*fA | | | | |
| | CA | | | | | | |
| WV- | GGGUC | 647 | mG*mG*mG*mU*mC*A*G*C | 1399 | XXXXXXXXXX | ASO1 Malat1 2OMe | Malat1 |
| 2559 | AGCTG | | *T*G*C*C*A*A*T*mG*mC* | | XXXXXXXXX | 5-10-5 Full PS | |
| | CCAAT | | mU*mA*mG | | | version | |
| | GCUAG | | | | | | |
| WV- | GGGUC | 648 | mG*mGmGmUmC*A*G*C*T | 1400 | XOOOXXXXX | ASO1 Malat1 2OMe | Malat1 |
| 2560 | AGCTG | | *G*C*C*A*A*T*mGmCmUm | | XXXXXXOOO | 5-10-5 WV-1497 | |
| | CCAAT | | A*mG | | X | like version | |
| | GCUAG | | | | | | |
| WV- | GGGUC | 649 | mG*G*mG*mU*mC*A*G*C* | 1401 | XXXXXXXXXX | ASO1 Malat1 2OMe | Malat1 |
| 2562 | AGCTG | | T*G*C*C*A*A*T*mG*mC*m | | XXXXXXXXXX | 1-1-3-10-3-1-1 Full | |
| | CCAAT | | U*A*mG | | X | PS version Frank2 | |
| | GCUAG | | | | | | |
| WV- | GGGUC | 650 | mG*G*mGmUmC*A*G*C*T* | 1402 | XXOOXXXXX | ASO1 Malat1 2OMe | Malat1 |
| 2564 | AGCTG | | G*C*C*A*A*T*mGmCmUA* | | XXXXXXOOO | 1-1-3-10-3-1-1 PO | |
| | CCAAT | | mG | | X | PS Frank2 | |
| | GCUAG | | | | | | |
| WV- | GGGUC | 651 | mG*mG*G*mU*mC*A*G*C* | 1403 | XXXXXXXXX | ASO1 Malat1 2OMe | Malat1 |
| 2566 | AGCTG | | T*G*C*C*A*A*T*mG*mC*T | | XXXXXXXXX | 2-1-2-10-2-1-2 Full | |
| | CCAAT | | *mA*mG | | X | PS version Frank3 | |
| | GCTAG | | | | | | |
| WV- | GGGUC | 652 | mG*mGG*mUmC*A*G*C*T* | 1404 | XOXOXXXXX | ASO1 Malat1 2OMe | Malat1 |
| 2568 | AGCTG | | G*C*C*A*A*T*mGmCT*mA | | XXXXXXOOX | 2-1-2-10-2-1-2 PO | |
| | CCAAT | | *mG | | X | PS version Frank3 | |
| | GCTAG | | | | | | |
| WV- | GGGTC | 653 | mG*mG*mG*T*mC*A*G*C* | 1405 | XXXXXXXXX | ASO1 Malat1 2OMe | Malat1 |
| 2570 | AGCTG | | T*G*C*C*A*A*T*mG*C*mU | | XXXXXXXXX | 3-1-1-10-1-1-3 Full | |
| | CCAAT | | *mA*mG | | X | PS version Nenad1 | |
| | GCUAG | | | | | | |
| WV- | GGGTC | 654 | mG*mGmGT*mC*A*G*C*T* | 1406 | XOOXXXXXX | ASO1 Malat1 2OMe | Malat1 |
| 2572 | AGCTG | | G*C*C*A*A*T*mGC*mUmA | | XXXXXXOXO | 3-1-1-10-1-1-3 PO | |
| | CCAAT | | *mG | | X | PS like version | |
| | GCUAG | | | | | Nenad1 | |
| WV- | GGGUC | 655 | G*G*mG*mU*mC*A*G*C*T* | 1407 | XXXXXXXXX | ASO1 Malat1 2OMe | Malat1 |
| 2574 | AGCTG | | G*C*C*A*A*T*mG*mC*mU* | | XXXXXXXXX | 2-3-10-3-2 PO PS | |
| | CCAAT | | A*G | | X | like version | |
| | GCUAG | | | | | Chandra1 | |
| WV- | GGGUC | 656 | G*mGmGmUmC*A*G*C*T*G | 1408 | XOOOXXXXX | ASO1 Malat1 2OMe | Malat1 |
| 2576 | AGCTG | | *C*C*A*A*T*mGmCmUmA* | | XXXXXXOOO | 1-4-10-4-1 PO PS | |
| | CCAAT | | G | | X | like version | |
| | GCUAG | | | | | Chandra2 | |
| WV- | GGGTC | 657 | Geo*Geo*Geo*Teo*m5Ceo*A | 1409 | XXXXXXXXX | Randomer for WV- | Malat1 |
| 2735 | AGCTG | | *G*C*T*G*C*C*A*A*T*Geo | | XXXXXXXXX | 2526 | |
| | CCAAT | | *m5Ceo*Teo*Aeo*Geo | | X | | |
| | GCTAG | | | | | | |
| WV- | GGGTC | 658 | Geo*Geo*Geo*Teo*Ceo*A*G* | 1410 | XXXXXXXXX | Randomer for WV- | Malat1 |
| 2736 | AGCTG | | C*T*G*C*C*A*A*T*Geo*Ce | | XXXXXXXXX | 2526 | |
| | CCAAT | | 0*Teo*Aeo*Geo | | X | | |
| | GCTAG | | | | | | |
| WV- | GGGUC | 659 | Mod013L001*mG*mG*mG*m | 1411 | OXXXXXXXX | Lauric acid OMe | Malat1 |
| 2753 | AGCTG | | U*mC*A*G*C*T*G*C*C*A* | | XXXXXXXXX | full-PS | |
| | CCAAT | | A*T*mG*mC*mU*mA*mG | | XXX | | |
| | GCUAG | | | | | | |
| WV- | GGGUC | 660 | Mod014L001*mG*mG*mG*m | 1412 | OXXXXXXXX | Myristic acid OMe | Malat1 |
| 2754 | AGCTG | | U*mC*A*G*C*T*G*C*C*A* | | XXXXXXXXX | full-PS | |
| | CCAAT | | A*T*mG*mC*mU*mA*mG | | XXX | | |
| | GCUAG | | | | | | |
| WV- | GGGUC | 661 | Mod005L001*mG*mG*mG*m | 1413 | OXXXXXXXX | Palmitic acid OMe | Malat1 |
| 2755 | AGCTG | | U*mC*A*G*C*T*G*C*C*A* | | XXXXXXXXX | full-PS | |
| | CCAAT | | A*T*mG*mC*mU*mA*mG | | XXX | | |
| | GCUAG | | | | | | |
| WV- | GGGUC | 662 | Mod015L001*mG*mG*mG*m | 1414 | OXXXXXXXX | Stearic acid OMe | Malat1 |
| 2756 | AGCTG | | U*mC*A*G*C*T*G*C*C*A* | | XXXXXXXXX | full-PS | |
| | CCAAT | | A*T*mG*mC*mU*mA*mG | | XXX | | |
| | GCUAG | | | | | | |
| WV- | GGGUC | 663 | Mod016L001*mG*mG*mG*m | 1415 | OXXXXXXXX | Oleic acid OMe full- | Malat1 |
| 2757 | AGCTG | | U*mC*A*G*C*T*G*C*C*A* | | XXXXXXXXX | PS | |
| | CCAAT | | A*T*mG*mC*mU*mA*mG | | XXX | | |
| | GCUAG | | | | | | |
| WV- | GGGUC | 664 | Mod017L001*mG*mG*mG*m | 1416 | OXXXXXXXX | Linoleic acid OMe | Malat1 |
| 2758 | AGCTG | | U*mC*A*G*C*T*G*C*C*A* | | XXXXXXXXX | full-PS | |
| | CCAAT | | A*T*mG*mC*mU*mA*mG | | XXX | | |
| | GCUAG | | | | | | |
| WV- | GGGUC | 665 | Mod018L001*mG*mG*mG*m | 1417 | OXXXXXXXX | alpha-Linolenic acid | Malat1 |
| 2759 | AGCTG | | U*mC*A*G*C*T*G*C*C*A* | | XXXXXXXXX | OMe full-PS | |
| | CCAAT | | A*T*mG*mC*mU*mA*mG | | XXX | | |
| | GCUAG | | | | | | |
| WV- | GGGUC | 666 | Mod019L001*mG*mG*mG*m | 1418 | OXXXXXXXX | gamma-Linolenic | Malat1 |
| 2760 | AGCTG | | U*mC*A*G*C*T*G*C*C*A* | | XXXXXXXXX | acid OMe full-PS | |
| | CCAAT | | A*T*mG*mC*mU*mA*mG | | XXX | | |
| | GCUAG | | | | | | |
| WV- | GGGUC | 667 | Mod006L001*mG*mG*mG*m | 1419 | OXXXXXXXX | DHA OMe full-PS | Malat1 |
| 2761 | AGCTG | | U*mC*A*G*C*T*G*C*C*A* | | XXXXXXXXX | | |
| | CCAAT | | A*T*mG*mC*mU*mA*mG | | XXX | | |
| | GCUAG | | | | | | |
| WV- | GGGUC | 668 | Mod020L001*mG*mG*mG*m | 1420 | OXXXXXXXX | Turbinaric acid OMe | Malat1 |
| 2762 | AGCTG | | U*mC*A*G*C*T*G*C*C*A* | | XXXXXXXXX | full-PS | |
| | CCAAT | | A*T*mG*mC*mU*mA*mG | | XXX | | |
| | GCUAG | | | | | | |
| WV- | GGGUC | 669 | Mod021*mG*mG*mG*mU*m | 1421 | XXXXXXXXX | Dilinoleyl alcohol | Malat1 |
| 2763 | AGCTG | | C*A*G*C*T*G*C*C*A*A*T* | | XXXXXXXXX | OMe full-PS | |
| | CCAAT | | mG*mC*mU*mA*mG | | XX | | |
| | GCUAG | | | | | | |
| WV- | GGGUC | 670 | Mod024L001*mG*mG*mG*m | 1422 | OXXXXXXXX | Triantennary | Malat1 |
| 2764 | AGCTG | | U*mC*A*G*C*T*G*C*C*A* | | XXXXXXXXX | GlcNAc OMe full- | |
| | CCAAT | | A*T*mG*mC*mU*mA*mG | | XXX | PS | |
| | GCUAG | | | | | | |
| WV- | GGGUC | 671 | Mod025L001*mG*mG*mG*m | 1423 | OXXXXXXXX | Triantennary beta- | Malat1 |
| 2765 | AGCTG | | U*mC*A*G*C*T*G*C*C*A* | | XXXXXXXXX | Mannose OMe full- | |
| | CCAAT | | A*T*mG*mC*mU*mA*mG | | XXX | PS | |
| | GCUAG | | | | | | |
| WV- | GGGUC | 672 | Mod026L001*mG*mG*mG*m | 1424 | OXXXXXXXX | Triantennary alpha- | Malat1 |
| 2766 | AGCTG | | U*mC*A*G*C*T*G*C*C*A* | | XXXXXXXXX | Mannose OMe full- | |
| | CCAAT | | A*T*mG*mC*mU*mA*mG | | XXX | PS | |
| | GCUAG | | | | | | |
| WV- | GGGUC | 673 | Mod013L001*mG*mGmGmU | 1425 | OXXOOOXXX | Lauric acid OMe | Malat1 |
| 2767 | AGCTG | | mC*A*G*C*T*G*C*C*A*A* | | XXXXXXXXO | PSVPO wing | |
| | CCAAT | | T*mGmCmUmA*mG | | OOX | | |
| | GCUAG | | | | | | |
| WV- | GGGUC | 674 | Mod014L001*mG*mGmGmU | 1426 | OXXOOOXXX | Myristic acid OMe | Malat1 |
| 2768 | AGCTG | | mC*A*G*C*T*G*C*C*A*A* | | XXXXXXXXO | PSVPO wing | |
| | CCAAT | | T*mGmCmUmA*mG | | OOX | | |
| | GCUAG | | | | | | |
| WV- | GGGUC | 675 | Mod005L001*mG*mGmGmU | 1427 | OXXOOOXXX | Palmitic acid OMe | Malat1 |
| 2769 | AGCTG | | mC*A*G*C*T*G*C*C*A*A* | | XXXXXXXXO | PSVPO wing | |
| | CCAAT | | T*mGmCmUmA*mG | | OOX | | |
| | GCUAG | | | | | | |
| WV- | GGGUC | 676 | Mod015L001*mG*mGmGmU | 1428 | OXXOOOXXX | Stearic acid OMe | Malat1 |
| 2770 | AGCTG | | mC*A*G*C*T*G*C*C*A*A* | | XXXXXXXXO | PSVPO wing | |
| | CCAAT | | T*mGmCmUmA*mG | | OOX | | |
| | GCUAG | | | | | | |
| WV- | GGGUC | 677 | Mod016L001*mG*mGmGmU | 1429 | OXXOOOXXX | Oleic acid OMe | Malat1 |
| 2771 | AGCTG | | mC*A*G*C*T*G*C*C*A*A* | | XXXXXXXXO | PSVPO wing | |
| | CCAAT | | T*mGmCmUmA*mG | | OOX | | |
| | GCUAG | | | | | | |
| WV- | GGGUC | 678 | Mod017L001*mG*mGmGmU | 1430 | OXXOOOXXX | Linoleic acid OMe | Malat1 |
| 2772 | AGCTG | | mC*A*G*C*T*G*C*C*A*A* | | XXXXXXXXO | PSVPO wing | |
| | CCAAT | | T*mGmCmUmA*mG | | OOX | | |
| | GCUAG | | | | | | |
| WV- | GGGUC | 679 | Mod018L001*mG*mGmGmU | 1431 | OXXOOOXXX | alpha-Linolenic acid | Malat1 |
| 2773 | AGCTG | | mC*A*G*C*T*G*C*C*A*A* | | XXXXXXXXO | OMe PSVPO wing | |
| | CCAAT | | T*mGmCmUmA*mG | | OOX | | |
| | GCUAG | | | | | | |
| WV- | GGGUC | 680 | Mod019L001*mG*mGmGmU | 1432 | OXXOOOXXX | gamma-Linolenic | Malat1 |
| 2774 | AGCTG | | mC*A*G*C*T*G*C*C*A*A* | | XXXXXXXXO | acid OMe PSVPO | |
| | CCAAT | | T*mGmCmUmA*mG | | OOX | wing | |
| | GCUAG | | | | | | |
| WV- | GGGUC | 681 | Mod006L001*mG*mGmGmU | 1433 | OXXOOOXXX | DHA OMe PSVPO | Malat1 |
| 2775 | AGCTG | | mC*A*G*C*T*G*C*C*A*A* | | XXXXXXXXO | wing | |
| | CCAAT | | T*mGmCmUmA*mG | | OOX | | |
| | GCUAG | | | | | | |
| WV- | GGGUC | 682 | Mod020L001*mG*mGmGmU | 1434 | OXXOOOXXX | Turbinaric acid OMe | Malat1 |
| 2776 | AGCTG | | mC*A*G*C*T*G*C*C*A*A* | | XXXXXXXXO | PSVPO wing | |
| | CCAAT | | T*mGmCmUmA*mG | | OOX | | |
| | GCUAG | | | | | | |
| WV- | GGGUC | 683 | Mod021*mG*mGmGmUmC*A | 1435 | XXOOOXXXX | Dilinoleyl alcohol | Malat1 |
| 2777 | AGCTG | | *G*C*T*G*C*C*A*A*T*mG | | XXXXXXXOO | OMe PSVPO wing | |
| | CCAAT | | mCmUmA*mG | | OX | | |
| | GCUAG | | | | | | |
| WV- | GGGUC | 684 | Mod024L001*mG*mGmGmU | 1436 | OXXOOOXXX | Triantennary | Malat1 |
| 2778 | AGCTG | | mC*A*G*C*T*G*C*C*A*A* | | XXXXXXXXO | GlcNAc OMe | |
| | CCAAT | | T*mGmCmUmA*mG | | OOX | PSVPO wing | |
| | GCUAG | | | | | | |
| WV- | GGGUC | 685 | Mod025L001*mG*mGmGmU | 1437 | OXXOOOXXX | Triantennary beta- | Malat1 |
| 2779 | AGCTG | | mC*A*G*C*T*G*C*C*A*A* | | XXXXXXXXO | Mannose OMe | |
| | CCAAT | | T*mGmCmUmA*mG | | OOX | PSVPO wing | |
| | GCUAG | | | | | | |
| WV- | GGGUC | 686 | Mod026L001*mG*mGmGmU | 1438 | OXXOOOXXX | Triantennary alpha- | Malat1 |
| 2780 | AGCTG | | mC*A*G*C*T*G*C*C*A*A* | | XXXXXXXXO | Mannose OMe | |
| | CCAAT | | T*mGmCmUmA*mG | | OOX | PSVPO wing | |
| | GCUAG | | | | | | |
| WV- | CUAGC | 687 | rCrUrArGrCrArUrUrGrGrCrAr | 1439 | OOOOOOOOO | complementary | Malat1 |
| 2781 | AUUG | | GrCrUrGrArCrCrC | | OOOOOOOOO | RNA coding Malat1 | |
| | GCAGC | | | | O | | |
| | UGACC | | | | | | |
| | C | | | | | | |
| WV- | GGGTC | 688 | L001*Geo*Geo*Geo*Teo*m5C | 1440 | XXXXXXXXX | C6amine linker | Malat1 |
| 2809 | AGCTG | | eo*A*G*C*T*G*C*C*A*A*T | | XXXXXXXXX | MOE full-PS | |
| | CCAAT | | *Geo*m5Ceo*Teo*Aeo*Geo | | XX | | |
| | GCTAG | | | | | | |
| WV- | GGGUC | 689 | L001*mG*mG*mG*mU*mC* | 1441 | XXXXXXXXX | C6amine linker | Malat1 |
| 2810 | AGCTG | | A*G*C*T*G*C*C*A*A*T*m | | XXXXXXXXX | OMe full-PS | |
| | CCAAT | | G*mC*mU*mA*mG | | XX | | |
| | GCUAG | | | | | | |
| WV- | GGGUC | 690 | L001*mG*mGmGmUmC*A*G | 1442 | XXOOOXXXX | C6amine linker | Malat1 |
| 2811 | AGCTG | | *C*T*G*C*C*A*A*T*mGmC | | XXXXXXXOO | OMe PSVPO wing | |
| | CCAAT | | mUmA*mG | | OX | | |
| | GCUAG | | | | | | |
| WV- | GGGTC | 691 | Mod013L001*Geo*Geo*Geo*T | 1443 | OXXXXXXXX | Lauric acid MOE | Malat1 |
| 2821 | AGCTG | | eo*m5Ceo*A*G*C*T*G*C*C* | | XXXXXXXXX | full-PS | |
| | CCAAT | | A*A*T*Geo*m5Ceo*Teo*Aeo | | XXX | | |
| | GCTAG | | *Geo | | | | |
| WV- | GGGTC | 692 | Mod014L001*Geo*Geo*Geo*T | 1444 | OXXXXXXXX | Myristic acid MOE | Malat1 |
| 2822 | AGCTG | | eo*m5Ceo*A*G*C*T*G*C*C* | | XXXXXXXXX | full-PS | |
| | CCAAT | | A*A*T*Geo*m5Ceo*Teo*Aeo | | XXX | | |
| | GCTAG | | *Geo | | | | |
| WV- | GGGTC | 693 | Mod005L001*Geo*Geo*Geo*T | 1445 | OXXXXXXXX | Palmitic acid MOE | Malat1 |
| 2823 | AGCTG | | eo*m5Ceo*A*G*C*T*G*C*C* | | XXXXXXXXX | full-PS | |
| | CCAAT | | A*A*T*Geo*m5Ceo*Teo*Aeo | | XXX | | |
| | GCTAG | | *Geo | | | | |
| WV- | GGGTC | 694 | Mod015L001*Geo*Geo*Geo*T | 1446 | OXXXXXXXX | Stearic acid MOE | Malat1 |
| 2824 | AGCTG | | eo*m5Ceo*A*G*C*T*G*C*C* | | XXXXXXXXX | full-PS | |
| | CCAAT | | A*A*T*Geo*m5Ceo*Teo*Aeo | | XXX | | |
| | GCTAG | | *Geo | | | | |
| WV- | GGGTC | 695 | Mod016L001*Geo*Geo*Geo*T | 1447 | OXXXXXXXX | Oleic acid MOE | Malat1 |
| 2825 | AGCTG | | eo*m5Ceo*A*G*C*T*G*C*C* | | XXXXXXXXX | full-PS | |
| | CCAAT | | A*A*T*Geo*m5Ceo*Teo*Aeo | | XXX | | |
| | GCTAG | | *Geo | | | | |
| WV- | GGGTC | 696 | Mod017L001*Geo*Geo*Geo*T | 1448 | OXXXXXXXX | Linoleic acid MOE | Malat1 |
| 2826 | AGCTG | | eo*m5Ceo*A*G*C*T*G*C*C* | | XXXXXXXXX | full-PS | |
| | CCAAT | | A*A*T*Geo*m5Ceo*Teo*Aeo | | XXX | | |
| | GCTAG | | *Geo | | | | |
| WV- | GGGTC | 697 | Mod018L001*Geo*Geo*Geo*T | 1449 | OXXXXXXXX | alpha-Linolenic acid | Malat1 |
| 2827 | AGCTG | | eo*m5Ceo*A*G*C*T*G*C*C* | | XXXXXXXXX | MOE full-PS | |
| | CCAAT | | A*A*T*Geo*m5Ceo*Teo*Aeo | | XXX | | |
| | GCTAG | | *Geo | | | | |
| WV- | GGGTC | 698 | Mod019L001*Geo*Geo*Geo*T | 1450 | OXXXXXXXX | gamma-Linolenic | Malat1 |
| 2828 | AGCTG | | eo*m5Ceo*A*G*C*T*G*C*C* | | XXXXXXXXX | acid MOE full-PS | |
| | CCAAT | | A*A*T*Geo*m5Ceo*Teo*Aeo | | XXX | | |
| | GCTAG | | *Geo | | | | |
| WV- | GGGTC | 699 | Mod006L001*Geo*Geo*Geo*T | 1451 | OXXXXXXXX | DHA MOE full-PS | Malat1 |
| 2829 | AGCTG | | eo*m5Ceo*A*G*C*T*G*C*C* | | XXXXXXXXX | | |
| | CCAAT | | A*A*T*Geo*m5Ceo*Teo*Aeo | | XXX | | |
| | GCTAG | | *Geo | | | | |
| WV- | GGGTC | 700 | Mod020L001*Geo*Geo*Geo*T | 1452 | OXXXXXXXX | Turbinaric acid | Malat1 |
| 2830 | AGCTG | | eo*m5Ceo*A*G*C*T*G*C*C* | | XXXXXXXXX | MOE full-PS | |
| | CCAAT | | A*A*T*Geo*m5Ceo*Teo*Aeo | | XXX | | |
| | GCTAG | | *Geo | | | | |
| WV- | GGGTC | 701 | Mod021*Geo*Geo*Geo*Teo* | 1453 | XXXXXXXXX | Dilinoleyl alcohol | Malat1 |
| 2831 | AGCTG | | m5Ceo*A*G*C*T*G*C*C*A* | | XXXXXXXXX | MOE full-PS | |
| | CCAAT | | A*T*Geo*m5Ceo*Teo*Aeo*G | | XX | | |
| | GCTAG | | eo | | | | |
| WV- | GGGTC | 702 | Mod024L001*Geo*Geo*Geo*T | 1454 | OXXXXXXXX | Triantennary | Malat1 |
| 2832 | AGCTG | | eo*m5Ceo*A*G*C*T*G*C*C* | | XXXXXXXXX | GlcNAc MOE full- | |
| | CCAAT | | A*A*T*Geo*m5Ceo*Teo*Aeo | | XXX | PS | |
| | GCTAG | | *Geo | | | | |
| WV- | GGGTC | 703 | Mod025L001*Geo*Geo*Geo*T | 1455 | OXXXXXXXX | Triantennary beta- | Malat1 |
| 2833 | AGCTG | | eo*m5Ceo*A*G*C*T*G*C*C* | | XXXXXXXXX | Mannose MOE full- | |
| | CCAAT | | A*A*T*Geo*m5Ceo*Teo*Aeo | | XXX | PS | |
| | GCTAG | | *Geo | | | | |
| WV- | GGGTC | 704 | Mod026L001*Geo*Geo*Geo*T | 1456 | OXXXXXXXX | Triantennary alpha- | Malat1 |
| 2834 | AGCTG | | eo*m5Ceo*A*G*C*T*G*C*C* | | XXXXXXXXX | Mannose MOE full- | |
| | CCAAT | | A*A*T*Geo*m5Ceo*Teo*Aeo | | XXX | PS | |
| | GCTAG | | *Geo | | | | |
| WV- | GGGTC | 705 | Mod027L001*Geo*Geo*Geo*T | 1457 | OXXXXXXXX | sulfonamide MOE | Malat1 |
| 2835 | AGCTG | | eo*m5Ceo*A*G*C*T*G*C*C* | | XXXXXXXXX | full-PS | |
| | CCAAT | | A*A*T*Geo*m5Ceo*Teo*Aeo | | XXX | | |
| | GCTAG | | *Geo | | | | |
| WV- | GGGTC | 706 | Mod028L001*Geo*Geo*Geo*T | 1458 | OXXXXXXXX | sulfonamide | Malat1 |
| 2836 | AGCTG | | eo*m5Ceo*A*G*C*T*G*C*C* | | XXXXXXXXX | alkylchain MOE | |
| | CCAAT | | A*A*T*Geo*m5Ceo*Teo*Aeo | | XXX | full-PS | |
| | GCTAG | | *Geo | | | | |
| WV- | GGGTC | 707 | Mod015L001*Geo*Geo*Geo*T | 1459 | OXXXXXXXX | Stearic acid and | Malat1 |
| 3062 | AGCTG | | eo*m5Ceo*A*G*C*T*G*C*C* | | XXXXXXXXX | GlucNAc, MOE, | |
| | CCAAT | | A*A*T*Geo*m5Ceo*Teo*Aeo | | XXX | full-PS | |
| | GCTAG | | *Geo*L004Mod024 | | | | |
| WV- | GGGTC | 708 | Mod019L001*Geo*Geo*Geo*T | 1460 | OXXXXXXXX | gamma-Linolenic | Malat1 |
| 3063 | AGCTG | | eo*m5Ceo*A*G*C*T*G*C*C* | | XXXXXXXXX | acid and GlucNAc, | |
| | CCAAT | | A*A*T*Geo*m5Ceo*Teo*Aeo | | XXX | MOE, full-PS | |
| | GCTAG | | *Geo*L004Mod024 | | | | |
| WV- | GGGTC | 709 | Mod020L001*Geo*Geo*Geo*T | 1461 | OXXXXXXXX | Turbinaric acid and | Malat1 |
| 3064 | AGCTG | | eo*m5Ceo*A*G*C*T*G*C*C* | | XXXXXXXXX | GlucNAc, MOE, | |
| | CCAAT | | A*A*T*Geo*m5Ceo*Teo*Aeo | | XXX | full-PS | |
| | GCTAG | | *Geo*L004Mod024 | | | | |
| WV- | GGGTC | 710 | Mod015L001*Geo*Geo*Geo*T | 1462 | OXXXXXXXX | Stearic acid and | Malat1 |
| 3065 | AGCTG | | eo*m5Ceo*A*G*C*T*G*C*C* | | XXXXXXXXX | Mannose, MOE, | |
| | CCAAT | | A*A*T*Geo*m5Ceo*Teo*Aeo | | XXX | full-PS | |
| | GCTAG | | *Geo*L004Mod026 | | | | |
| WV- | GGGTC | 711 | Mod019L001*Geo*Geo*Geo*T | 1463 | OXXXXXXXX | gamma-Linolenic | Malat1 |
| 3066 | AGCTG | | eo*m5Ceo*A*G*C*T*G*C*C* | | XXXXXXXXX | acid and Mannose, | |
| | CCAAT | | A*A*T*Geo*m5Ceo*Teo*Aeo | | XXX | MOE, full-PS | |
| | GCTAG | | *Geo*L004Mod026 | | | | |
| WV- | GGGTC | 712 | Mod020L001*Geo*Geo*Geo*T | 1464 | OXXXXXXXX | Turbinaric acid and | Malat1 |
| 3067 | AGCTG | | eo*m5Ceo*A*G*C*T*G*C*C* | | XXXXXXXXX | Mannose, MOE, | |
| | CCAAT | | A*A*T*Geo*m5Ceo*Teo*Aeo | | XXX | full-PS | |
| | GCTAG | | *Geo*L004Mod026 | | | | |
| WV- | UAGCG | 713 | mU*mA*mG*mC*mG*C*C*C | 1465 | XXXXXXXXX | 20mers, Full PS, 5- | Malat1 |
| 3154 | CCCAC | | *A*C*C*T*C*A*C*mC*mC* | | XXXXXXXXX | 10-5 2′OMe gapmers | |
| | CTCAC | | mC*mU*mC | | X | | |
| | CCCUC | | | | | | |
| WV- | UUAGC | 714 | mU*mU*mA*mG*mC*G*C*C | 1466 | XXXXXXXXX | 20 mers, Full PS, 5- | Malat1 |
| 3155 | GCCCA | | *C*A*C*C*T*C*A*mC*mC* | | XXXXXXXXX | 10-5 2′OMe gapmers | |
| | CCTCA | | mC*mC*mU | | X | | |
| | CCCCU | | | | | | |
| WV- | CUUAG | 715 | mC*mU*mU*mA*mG*C*G*C | 1467 | XXXXXXXXX | 20 mers, Full PS, 5- | Malat1 |
| 3156 | CGCCC | | *C*C*A*C*C*T*C*mA*mC* | | XXXXXXXXX | 10-5 2′OMe gapmers | |
| | ACCTC | | mC*mC*mC | | X | | |
| | ACCCC | | | | | | |
| WV- | ACCCC | 716 | mA*mC*mC*mC*mC*G*T*C | 1468 | XXXXXXXXX | 20 mers, Full PS, 5- | Malat1 |
| 3157 | GTCCT | | *C*T*G*G*A*A*A*mC*mC* | | XXXXXXXXX | 10-5 2′OMe gapmers | |
| | GGAA | | mA*mG*mG | | X | | |
| | ACCAG | | | | | | |
| | G | | | | | | |
| WV- | CCCCG | 717 | mC*mC*mC*mC*mG*T*C*C | 1469 | XXXXXXXXX | 20 mers, Full PS, 5- | Malat1 |
| 3158 | TCCTG | | *T*G*G*A*A*A*C*mC*mA* | | XXXXXXXXX | 10-5 2′OMe gapmers | |
| | GAAAC | | mG*mG*mA | | X | | |
| | CAGGA | | | | | | |
| WV- | GCUUA | 718 | mG*mC*mU*mU*mA*G*C*G | 1470 | XXXXXXXXX | 20 mers, Full PS, 5- | Malat1 |
| 3159 | GCGCC | | *C*C*C*A*C*C*T*mC*mA* | | XXXXXXXXX | 10-5 2′OMe gapmers | |
| | CACCT | | mC*mC*mC | | X | | |
| | CACCC | | | | | | |
| WV- | GGCUU | 719 | mG*mG*mC*mU*mU*A*G*C | 1471 | XXXXXXXXX | 20 mers, Full PS, 5- | Malat1 |
| 3160 | AGCGC | | *G*C*C*C*A*C*C*mU*mC* | | XXXXXXXXX | 10-5 2′OMe gapmers | |
| | CCACC | | mA*mC*mC | | X | | |
| | UCACC | | | | | | |
| WV- | CCCGU | 720 | mC*mC*mC*mG*mU*C*C*T | 1472 | XXXXXXXXX | 20 mers, Full PS, 5- | Malat1 |
| 3161 | CCTGG | | *G*G*A*A*A*C*C*mA*mG* | | XXXXXXXXX | 10-5 2′OMe gapmers | |
| | AAACC | | mG*mA*mG | | X | | |
| | AGGA | | | | | | |
| | G | | | | | | |
| WV- | UGAAC | 721 | mU*mG*mA*mA*mC*C*C*C | 1473 | XXXXXXXXX | 20 mers, Full PS, 5- | Malat1 |
| 3162 | CCCGT | | *G*T*C*C*T*G*G*mA*mA* | | XXXXXXXXX | 10-5 2′OMe gapmers | |
| | CCTGG | | mA*mC*mC | | X | | |
| | AAACC | | | | | | |
| WV- | UUUCC | 722 | mU*mU*mU*mC*mC*C*C*T | 1474 | XXXXXXXXX | 20 mers, Full PS, 5- | Malat1 |
| 3163 | CCTCC | | *C*C*C*T*C*A*T*mC*mA* | | XXXXXXXXX | 10-5 2′OMe gapmers | |
| | CTCAT | | mA*mC*mA | | X | | |
| | CAACA | | | | | | |
| WV- | AGCUC | 723 | mA*mG*mC*mU*mC*C*A*G | 1475 | XXXXXXXXX | 20 mers, Full PS, 5- | Malat1 |
| 3164 | CAGTC | | *T*C*C*C*T*G*A*mA*mG* | | XXXXXXXXX | 10-5 2′OMe gapmers | |
| | CCTGA | | mG*mU*mG | | X | | |
| | AGGU | | | | | | |
| | G | | | | | | |
| WV- | AGGCU | 724 | mA*mG*mG*mC*mU*T*A*G | 1476 | XXXXXXXXX | 20 mers, Full PS, 5- | Malat1 |
| 3165 | TAGCG | | *C*G*C*C*C*A*C*mC*mU* | | XXXXXXXXX | 10-5 2′OMe gapmers | |
| | CCCAC | | mC*mA*mC | | X | | |
| | CUCAC | | | | | | |
| WV- | GUUUC | 725 | mG*mU*mU*mU*mC*C*C*C | 1477 | XXXXXXXXX | 20 mers, Full PS, 5- | Malat1 |
| 3166 | CCCTC | | *T*C*C*C*T*C*A*mU*mC* | | XXXXXXXXX | 10-5 2′OMe gapmers | |
| | CCTCA | | mA*mA*mC | | X | | |
| | UCAAC | | | | | | |
| WV- | AACCC | 726 | mA*mA*mC*mC*mC*C*G*T | 1478 | XXXXXXXXX | 20 mers, Full PS, 5- | Malat1 |
| 3167 | CGTCC | | *C*C*T*G*G*A*A*mA*mC* | | XXXXXXXXX | 10-5 2′OMe gapmers | |
| | TGGAA | | mC*mA*mG | | X | | |
| | ACCAG | | | | | | |
| WV- | GAACC | 727 | mG*mA*mA*mC*mC*C*C*G | 1479 | XXXXXXXXX | 20 mers, Full PS, 5- | Malat1 |
| 3168 | CCGTC | | *T*C*C*T*G*G*A*mA*mA* | | XXXXXXXXX | 10-5 2′OMe gapmers | |
| | CTGGA | | mC*mC*mA | | X | | |
| | AACCA | | | | | | |
| WV- | GCUCC | 728 | mG*mC*mU*mC*mC*A*G*T | 1480 | XXXXXXXXX | 20 mers, Full PS, 5- | Malat1 |
| 3169 | AGTCC | | *C*C*C*T*G*A*A*mG*mG* | | XXXXXXXXX | 10-5 2′OMe gapmers | |
| | CTGAA | | mU*mG*mU | | X | | |
| | GGUG | | | | | | |
| | U | | | | | | |
| WV- | UUGA | 729 | mU*mU*mG*mA*mA*C*C*C | 1481 | XXXXXXXXX | 20 mers, Full PS, 5- | Malat1 |
| 3170 | ACCCC | | *C*G*T*C*C*T*G*mG*mA* | | XXXXXXXXX | 10-5 2′OMe gapmers | |
| | GTCCT | | mA*mA*mC | | X | | |
| | GGAA | | | | | | |
| | AC | | | | | | |
| WV- | UUCCC | 730 | mU*mU*mC*mC*mC*C*T*C | 1482 | XXXXXXXXX | 20 mers, Full PS, 5- | Malat1 |
| 3171 | CTCCC | | *C*C*T*C*A*T*C*mA*mA* | | XXXXXXXXX | 10-5 2′OMe gapmers | |
| | TCATC | | mC*mA*mA | | X | | |
| | AACAA | | | | | | |
| WV- | CCGUC | 731 | mC*mC*mG*mU*mC*C*T*G | 1483 | XXXXXXXXX | 20 mers, Full PS, 5- | Malat1 |
| 3172 | CTGGA | | *G*A*A*A*C*C*A*mG*mG* | | XXXXXXXXX | 10-5 2′OMe gapmers | |
| | AACCA | | mA*mG*mU | | X | | |
| | GGAG | | | | | | |
| | U | | | | | | |
| WV- | GCAGC | 732 | mG*mC*mA*mG*mC*T*C*C | 1484 | XXXXXXXXX | 20 mers, Full PS, 5- | Malat1 |
| 3173 | TCCAG | | *A*G*T*C*C*C*T*mG*mA* | | XXXXXXXXX | 10-5 2′OMe gapmers | |
| | TCCCT | | mA*mG*mG | | X | | |
| | GAAG | | | | | | |
| | G | | | | | | |
| WV- | UGCCA | 733 | mU*mG*mC*mC*mA*G*G*C | 1485 | XXXXXXXXX | 20 mers, Full PS, 5- | Malat1 |
| 3174 | GGCTG | | *T*G*G*T*T*A*T*mG*mA* | | XXXXXXXXX | 10-5 2′OMe gapmers | |
| | GTTAT | | mC*mU*mC | | X | | |
| | GACUC | | | | | | |
| WV- | CGUCC | 734 | mC*mG*mU*mC*mC*T*G*G | 1486 | XXXXXXXXX | 20 mers, Full PS, 5- | Malat1 |
| 3175 | TGGAA | | *A*A*A*C*C*A*G*mG*mA* | | XXXXXXXXX | 10-5 2′OMe gapmers | |
| | ACCAG | | mG*mU*mG | | X | | |
| | GAGU | | | | | | |
| | G | | | | | | |
| WV- | CAGCU | 735 | mC*mA*mG*mC*mU*C*C*A | 1487 | XXXXXXXXX | 20 mers, Full PS, 5- | Malat1 |
| 3176 | CCAGT | | *G*T*C*C*C*T*G*mA*mA* | | XXXXXXXXX | 10-5 2′OMe gapmers | |
| | CCCTG | | mG*mG*mU | | X | | |
| | AAGG | | | | | | |
| | U | | | | | | |
| WV- | CUGCC | 736 | mC*mU*mG*mC*mC*A*G*G | 1488 | XXXXXXXXX | 20 mers, Full PS, 5- | Malat1 |
| 3177 | AGGCT | | *C*T*G*G*T*T*A*mU*mG* | | XXXXXXXXX | 10-5 2′OMe gapmers | |
| | GGTTA | | mA*mC*mU | | X | | |
| | UGACU | | | | | | |
| WV- | UCCUG | 737 | mU*mC*mC*mU*mG*G*A*A | 1489 | XXXXXXXXX | 20 mers, Full PS, 5- | Malat1 |
| 3178 | GAAAC | | *A*C*C*A*G*G*A*mG*mU* | | XXXXXXXXX | 10-5 2′OMe gapmers | |
| | CAGGA | | mG*mC*mC | | X | | |
| | GUGCC | | | | | | |
| WV- | AAGGC | 738 | mA*mA*mG*mG*mC*T*T*A | 1490 | XXXXXXXXX | 20 mers, Full PS, 5- | Malat1 |
| 3179 | TTAGC | | *G*C*G*C*C*C*A*mC*mC* | | XXXXXXXXX | 10-5 2′OMe gapmers | |
| | GCCCA | | mU*mC*mA | | X | | |
| | CCUCA | | | | | | |
| WV- | CCAGG | 739 | mC*mC*mA*mG*mG*C*T*G | 1491 | XXXXXXXXX | 20 mers, Full PS, 5- | Malat1 |
| 3180 | CTGGT | | *G*T*T*A*T*G*A*mC*mU* | | XXXXXXXXX | 10-5 2′OMe gapmers | |
| | TATGA | | mC*mA*mG | | X | | |
| | CUCAG | | | | | | |
| WV- | CCUGG | 740 | mC*mC*mU*mG*mG*A*A*A | 1492 | XXXXXXXXX | 20 mers, Full PS, 5- | Malat1 |
| 3181 | AAACC | | *C*C*A*G*G*A*G*mU*mG* | | XXXXXXXXX | 10-5 2′OMe gapmers | |
| | AGGA | | mC*mC*mA | | X | | |
| | GUGCC | | | | | | |
| | A | | | | | | |
| WV- | GCCAG | 741 | mG*mC*mC*mA*mG*G*C*T | 1493 | XXXXXXXXX | 20 mers, Full PS, 5- | Malat1 |
| 3182 | GCTGG | | *G*G*T*T*A*T*G*mA*mC* | | XXXXXXXXX | 10-5 2′OMe gapmers | |
| | TTATG | | mU*mC*mA | | X | | |
| | ACUCA | | | | | | |
| WV- | AAAG | 742 | mA*mA*mA*mG*mG*C*T*T | 1494 | XXXXXXXXX | 20 mers, Full PS, 5- | Malat1 |
| 3183 | GCTTA | | *A*G*C*G*C*C*C*mA*mC* | | XXXXXXXXX | 10-5 2′OMe gapmers | |
| | GCGCC | | mC*mU*mC | | X | | |
| | CACCU | | | | | | |
| | C | | | | | | |
| WV- | GGAU | 743 | mG*mG*mA*mU*mU*G*G* | 1495 | XXXXXXXXX | 20 mers, Full PS, 5- | Malat1 |
| 3184 | UGGG | | G*A*G*T*T*A*C*T*mU*mG | | XXXXXXXXX | 10-5 2′OMe gapmers | |
| | AGTTA | | *mC*mC*mA | | X | | |
| | CTUGC | | | | | | |
| | CA | | | | | | |
| WV- | GUCCU | 744 | mG*mU*mC*mC*mU*G*G*A | 1496 | XXXXXXXXX | 20 mers, Full PS, 5- | Malat1 |
| 3185 | GGAA | | *A*A*C*C*A*G*G*mA*mG* | | XXXXXXXXX | 10-5 2′OMe gapmers | |
| | ACCAG | | mU*mG*mC | | X | | |
| | GAGU | | | | | | |
| | GC | | | | | | |
| WV- | CAGGC | 745 | mC*mA*mG*mG*mC*T*G*G | 1497 | XXXXXXXXX | 20 mers, Full PS, 5- | Malat1 |
| 3186 | TGGTT | | *T*T*A*T*G*A*C*mU*mC* | | XXXXXXXXX | 10-5 2′OMe gapmers | |
| | ATGAC | | mA*mG*mA | | X | | |
| | UCAGA | | | | | | |
| WV- | GGGA | 746 | mG*mG*mG*mA*mG*T*T*A | 1498 | XXXXXXXXX | 20 mers, Full PS, 5- | Malat1 |
| 3187 | GTTAC | | *C*T*T*G*C*C*A*mA*mC* | | XXXXXXXXX | 10-5 2′OMe gapmers | |
| | TTGCC | | mU*mU*mG | | X | | |
| | AACUU | | | | | | |
| | G | | | | | | |
| WV- | UGGG | 747 | mU*mG*mG*mG*mA*G*T*T | 1499 | XXXXXXXXX | 20 mers, Full PS, 5- | Malat1 |
| 3188 | AGTTA | | *A*C*T*T*G*C*C*mA*mA* | | XXXXXXXXX | 10-5 2′OMe gapmers | |
| | CTTGC | | mC*mU*mU | | X | | |
| | CAACU | | | | | | |
| | U | | | | | | |
| WV- | UUGG | 748 | mU*mU*mG*mG*mG*A*G*T | 1500 | XXXXXXXXX | 20 mers, Full PS, 5- | Malat1 |
| 3189 | GAGTT | | *T*A*C*T*T*G*C*mC*mA* | | XXXXXXXXX | 10-5 2′OMe gapmers | |
| | ACTTG | | mA*mC*mU | | X | | |
| | CCAAC | | | | | | |
| | U | | | | | | |
| WV- | AUUUC | 749 | mA*mU*mU*mU*mC*C*T*C | 1501 | XXXXXXXXX | 20 mers, Full PS, 5- | Malat1 |
| 3190 | CTCAA | | *A*A*C*A*C*T*C*mA*mG* | | XXXXXXXXX | 10-5 2′OMe gapmers | |
| | CACTC | | mC*mC*mU | | X | | |
| | AGCCU | | | | | | |
| WV- | CCCCU | 750 | mC*mC*mC*mC*mU*C*C*C | 1502 | XXXXXXXXX | 20 mers, Full PS, 5- | Malat1 |
| 3191 | CCCTC | | *T*C*A*T*C*A*A*mC*mA* | | XXXXXXXXX | 10-5 2′OMe gapmers | |
| | ATCAA | | mA*mA*mA | | X | | |
| | CAAAA | | | | | | |
| WV- | ACAUU | 751 | mA*mC*mA*mU*mU*T*C*C | 1503 | XXXXXXXXX | 20 mers, Full PS, 5- | Malat1 |
| 3192 | TCCAC | | *A*C*T*T*G*C*C*mA*mG* | | XXXXXXXXX | 10-5 2′OMe gapmers | |
| | TTGCC | | mU*mU*mA | | X | | |
| | AGUU | | | | | | |
| | A | | | | | | |
| WV- | AAAA | 752 | mA*mA*mA*mA*mG*G*C*T | 1504 | XXXXXXXXX | 20 mers, Full PS, 5- | Malat1 |
| 3193 | GGCTT | | *T*A*G*C*G*C*C*mC*mA* | | XXXXXXXXX | 10-5 2′OMe gapmers | |
| | AGCGC | | mC*mC*mU | | X | | |
| | CCACC | | | | | | |
| | U | | | | | | |
| WV- | ACCUG | 753 | mA*mC*mC*mU*mG*T*C*T | 1505 | XXXXXXXXX | 20 mers, Full PS, 5- | Malat1 |
| 3194 | TCTGA | | *G*A*G*G*C*A*A*mA*mC* | | XXXXXXXXX | 10-5 2′OMe gapmers | |
| | GGCAA | | mG*mA*mA | | X | | |
| | ACGAA | | | | | | |
| WV- | AUUG | 754 | mA*mU*mU*mG*mG*G*A* | 1506 | XXXXXXXXX | 20 mers, Full PS, 5- | Malat1 |
| 3195 | GGAGT | | G*T*T*A*C*T*T*G*mC*mC | | XXXXXXXXX | 10-5 2′OMe gapmers | |
| | TACTT | | *mA*mA*mC | | X | | |
| | GCCAA | | | | | | |
| | C | | | | | | |
| WV- | UCAAC | 755 | mU*mC*mA*mA*mC*A*A*A | 1507 | XXXXXXXXX | 20 mers, Full PS, 5- | Malat1 |
| 3196 | AAAA | | *A*G*C*C*C*A*C*mC*mC* | | XXXXXXXXX | 10-5 2′OMe gapmers | |
| | GCCCA | | mU*mC*mU | | X | | |
| | CCCUC | | | | | | |
| | U | | | | | | |
| WV- | CUAAG | 756 | mC*mU*mA*mA*mG*A*T*G | 1508 | XXXXXXXXX | 20 mers, Full PS, 5- | Malat1 |
| 3197 | ATGCT | | *C*T*A*G*C*T*T*mG*mG* | | XXXXXXXXX | 10-5 2′OMe gapmers | |
| | AGCTT | | mC*mC*mA | | X | | |
| | GGCCA | | | | | | |
| WV- | GGGTC | 757 | L001Geo*Geo*Geo*Teo*m5Ce | 1509 | OXXXXXXXX | C6amine PO linker, | Malat1 |
| 3356 | AGCTG | | o*A*G*C*T*G*C*C*A*A*T* | | XXXXXXXXX | MOE, full-PS | |
| | CCAAT | | Geo*m5Ceo*Teo*Aeo*Geo | | XXX | | |
| | GCTAG | | | | | | |
| WV- | GGGTC | 758 | Mod030Geo*Geo*Geo*Teo*m | 1510 | OXXXXXXXX | WV-2735 based; | Malat1 |
| 3521 | AGCTG | | 5Ceo*A*G*C*T*G*C*C*A*A | | XXXXXXXXX | with PO linker, | |
| | CCAAT | | *T*Geo*m5Ceo*Teo*Aeo*Geo | | XX | Lauric acid | |
| | GCTAG | | | | | | |
| WV- | GGGTC | 759 | Mod031Geo*Geo*Geo*Teo*m | 1511 | OXXXXXXXX | WV-2735 based; | Malat1 |
| 3522 | AGCTG | | 5Ceo*A*G*C*T*G*C*C*A*A | | XXXXXXXXX | with PO inker, | |
| | CCAAT | | *T*Geo*m5Ceo*Teo*Aeo*Geo | | XX | Myristic acid | |
| | GCTAG | | | | | | |
| WV- | GGGTC | 760 | Mod032Geo*Geo*Geo*Teo*m | 1512 | OXXXXXXXX | WV-2735 based; | Malat1 |
| 3523 | AGCTG | | 5Ceo*A*G*C*T*G*C*C*A*A | | XXXXXXXXX | with PO linker, | |
| | CCAAT | | *T*Geo*m5Ceo*Teo*Aeo*Geo | | XX | Palmitic acid | |
| | GCTAG | | | | | | |
| WV- | GGGTC | 761 | Mod033Geo*Geo*Geo*Teo*m | 1513 | OXXXXXXXX | WV-2735 based; | Malat1 |
| 3524 | AGCTG | | 5Ceo*A*G*C*T*G*C*C*A*A | | XXXXXXXXX | with PO linker, | |
| | CCAAT | | *T*Geo*m5Ceo*Teo*Aeo*Geo | | XX | Stearic acid | |
| | GCTAG | | | | | | |

¹Including -C(O)-(noted as O) connecting Mod and the amino group of C6 amino linker and phosphate or phosphorothioate linkage connecting C6 amino linker and oligonucleotide chain (noted as X (stereorandom), S (Sp) or R (Sp)).
Abbreviations:
2\′: 2′
m5Ceo: 5-Methyl 2′-Methoxyethyl C
C6: C6 amino linker (L001, -NH-(CH₂)₆- wherein -NH- is connected to Mod (through -C(O)-) or -H, and -(CH₂)₆- is connected to the 5′-end of oligonucleotide chain through, e.g., phosphodiester (illustrated in the Table as O or PO), phosphorothioate (illustrated in the Table as * if the phosphorothioate not chirally controlled; * S, S, or Sp, if chirally controlled and has an Sp configuration, and *R, R, or Rp, if chirally controlled and has an Rp configuration), or phosphorodithioate (illustrated in the Table as PS2 or :). May also be referred to as C6 linker or C6 amine linker)

[1388] Lauric (in Mod013), Myristic (in Mod014), Palmitic (in Mod005), Stearic (in Mod015), Oleic (in Mod016), Linoleic (in Mod017), alpha-Linoleinc (in Mod018), gamma-Linolenic (in Mod019), DHA (in Mod006), Turbinaric (in Mod020), Dilinoleic (in Mod021), TriGlcNAc (in Mod024), TrialphaMannose (in Mod026), MonoSulfonamide (in Mod 027), TriSulfonamide (in Mod029), Lauric (in Mod030), Myristic (in Mod031), Palmitic (in Mod032), and Stearic (in Mod033): Lauric acid (for Mod013), Myristic acid (for Mod014), Palmitic acid (for Mod005), Stearic acid (for Mod015), Oleic acid (for Mod016), Linoleic acid (for Mod017), alpha-Linolenic acid (for Mod018), gamma-Linolenic acid (for Mod019), docosahexaenoic acid (for Mod006), Turbinaric acid (for Mod020), alcohol for Dilinoleyl (for Mod021), acid for TriGlcNAc (for Mod024), acid for TrialphaMannose (for Mod026), acid for MonoSulfonamide (for Mod 027), acid for TriSulfonamide (for Mod029), Lauryl alcohol (for Mod030), Myristyl alcohol (for Mod031), Palmityl alcohol (for Mod032), and Stearyl alcohol (for Mod033), respectively, conjugated to oligonucleotide chains through amide groups, C6 amino linker, phosphodiester linkage (PO), and/or phosphorothioate linkage (PS): Mod013 (Lauric acid with C6 amino linker and PO or PS), Mod014 (Myristic acid with C6 amino linker and PO or PS), Mod005 (Palmitic acid with C6 amino linker and PO or PS), Mod015 (Stearic acid with C6 amino linker and PO or PS), Mod016 (Oleic acid with C6 amino linker and PO or PS), Mod017 (Linoleic acid with C6 amino linker and PO or PS), Mod018 (alpha-Linolenic acid with C6 amino linker and PO or PS), Mod019 (gamma-Linolenic acid with C6 amino linker and PO or PS), Mod006 (DHA with C6 amino linker and PO or PS), Mod020 (Turbinaric acid with C6 amino linker and PO or PS), Mod021 (alcohol (see below) with PO or PS), Mod024 (acid (see below) with C6 amino linker and PO or PS), Mod026 (acid (see below) with C6 amino linker and PO or PS), Mod027 (acid (see below) with C6 amino linker and PO or PS), Mod029 (acid (see below) with C6 amino linker and PO or PS), Mod030 (Lauryl alcohol with PO or PS), Mod031 (Myristyl alcohol with PO or PS), Mod032 (Palmityl alcohol with PO or PS), and Mod033 (Stearyl alcohol with PO or PS), with PO or PS for each oligonucleotide indicated in the Table (for example, WV-3473 Lauric acid conjugated to oligonucleotide chain of WV-3473 via amide group, C6, and PO:
[1389] Mod013L001fU*SfC*SfA*SfA*SfG*SfG*SmAfA*SmGmA*SfU*SmGmGfC*SfA*SfU*SfU*SfU*SfC*SfU (SEQ ID NO: 1514) (Description), OOSSSSSSOSOSSOOSSSSSS (Stereochemistry), and/or WV-3473, Lauric acid, C6 PO linker (Notes);
[1390] WV-3557 Steary alcohol conjugated to oligonucleotide chain of WV-3473 via PS: Mod033*fU*SfC*SfA*SfA*SfG*SfG*SmAfA*SmGmA*SfU*SmGmGfC*SfA*SfU*SfU*SfU*SfC*SfU (SEQ ID NO: 1515) (Description), XSSSSSSOSOSSOOSSSSSS (Stereochemistry), and/or WV-3473, Stearic PS (Notes); and
[1391] WV-4106 Stearic acid conjugated to oligonucleotide chain of WV-3473 via amide group, C6, and PS:
[1392] Mod015L001*fU*SfC*SfA*SfA*SfG*SfG*SmAfA*SmGmA*SfU*SmGmGfC*SfA*SfU*SfU*SfU*SfC*SfU (SEQ ID NO: 1516) (Description), OXSSSSSSOSOSSOOSSSSSS (Stereochemistry), and/or WV-3473, C6 PS linker, Stearic acid (Notes))
   Moieties for conjugation, and example reagents (many of which were previously known and are commercially available or can be readily prepared using known technologies in accordance with the present disclosure, e.g., Lauric acid (for Mod013), Myristic acid (for Mod014), Palmitic acid (for Mod005), Stearic acid (for Mod015), Oleic acid (for Mod016), Linoleic acid (for Mod017), alpha-Linolenic acid (for Mod018), gamma-Linolenic acid (for Mod019), docosahexaenoic acid (for Mod006), Turbinaric acid (for Mod02O), alcohol for Dilinoleyl (for Mod021), Lauryl alcohol (for Mod03O), Myristyl alcohol (for Mod031), Palmityl alcohol (for Mod032), Stearyl alcohol (for Mod033), etc.) are listed below
[1393] m: 2′-OMe.
[1394] NA: Not Applicable; this term is generally used for negative controls
[1395] OMe: 2′-OMe
[1396] O, PO: phoshodiester (phosphate), or when used with Mod and L001, —C(O)— (connecting Mod and L001, for example,
[1397] Mod013L001fU*SfC*SfA*SfA*SfG*SfG*SmAfA*SmGmA*SfU*SmGmGfC*SfA*SfU*SfU*SfU*SfC*SfU (SEQ ID NO: 1514) (Description), OOSSSSSSOSOSSOOSSSSSS (Stereochemistry) and/or WV-3473, Lauric acid, C6 PO linker (Notes). Note the second O OOSSSSSSOSOSSOOSSSSSS (Stereochemistry) represents phosphodiester linkage connecting L001 and 5′-O— of oligonucleotide chain:
[1398] Mod013L001fU*SfC*SfA*SfA*SfG*SfG*SmAfA*SmGmA*SfU*SmGmGfC*SfA*SfU*SfU*SfU*SfC*SfU) (SEQ ID NO: 1514)
[1399] *, PS: Phosphorothioate
[1400] PS2, :, D: phosphorodithioate (e.g., WV-3078, wherein a colon (:) indicates a phosphorodithioate)
[1401] *R, R, Rp: Phosphorothioate in Rp conformation
[1402] *S, S, Sp: Phosphorothioate in Sp conformation
[1403] WV, W V—: WV—
[1404] X: Phosphorothioate stereorandom
   Example moieties (e.g., lipid moieties, targeting component, etc.) and example preparation reagents (e.g., acids, alcohols, etc.) for conjugation to prepare provided oligonucleotides, e.g., example oligonucleotides in Tables 1-4 comprising such moieties, in accordance with the present disclosure include the below:

[chemical structure]

[chemical structure]

[chemical structure]

[chemical structure]

[chemical structure]

[chemical structure]

[chemical structure]

[chemical structure]

[chemical structure]

[1405] Applicant notes that presented above in the Table are example ways of presenting structures of provided oligonucleotides, for example, WV-3546 (Mod020L001fU*SfC*SfA*SfA*SfG*SfG*SmAfA*SmGmA*SfU*SmGmGfC*SfA*SfU*SfU*SfU*SfC*SfU) (SEQ ID NO: 1517) can be presented as a lipid moiety (Mod020,

[chemical structure]

connected via —C(O)—(OOSSSSSSOSOSSOOSSSSSS) to the —NH— of —NH—(CH₂)₆—, wherein the —(CH₂)₆— is connected to the 5′-end of the oligonucleotide chain via a phosphodiester linkage (OOSSSSSSOSOSSOOSSSSSS). One having ordinary skill in the art understands that a provided oligonucleotide can be presented as combinations of lipid, linker and oligonucleotide chain units in many different ways, wherein in each way the combination of the units provides the same oligonucleotide. For example, WV-3546, can be considered to have a structure of A^{c}-[-L^{LD}-(R^{LD})ₐ]_{b}, wherein a is 1, b is 1, and have a lipid moiety R^{LD} of

[chemical structure]

connected to its oligonucleotide chain (A^{c}) portion through a linker L^{LD} of —C(O)—NH—(CH₂)₆—OP(═O)(OH)—O—, wherein —C(O)— is connected to R^{LD}, and —O— is connected to A^{c} (as 5′-O— of the oligonucleotide chain); one of the many alternative ways is that R^{LD} is

[chemical structure]

and L^{LD} is —NH—(CH₂)₆—OP(═O)(OH)—O—, wherein —NH— is connected to R^{LD}, and —O— is connected to Ac (as 5′-O— of the oligonucleotide chain).

[1406] Oligonucleotides were prepared and characterized using a variety of methods in accordance of the present disclosure. Example MS data are presented below:

TABLE 6
Example MS data.

| WAVE ID | Calculated Mass | Found Mass |
|---|---|---|
| WV-2531 | 6767.90000 | 6766.3 |
| WV-3152 | 6743.77000 | 6742.8 |
| WV-3472 | 6720.78472 | 6720.8 |
| WV-3473 | 6732.82024 | 6735 |
| WV-3507 | 6716.75464 | 6717.3 |
| WV-3508 | 6704.71912 | 6706 |
| WV-3509 | 6716.75464 | 6718 |
| WV-3510 | 6716.75464 | 6717.6 |
| WV-3511 | 6728.79016 | 6731 |
| WV-3512 | 6700.68904 | 6702 |
| WV-3513 | 6712.72456 | 6713 |
| WV-3514 | 6688.65352 | 6688.9 |
| WV-3515 | 6700.68904 | 6701.2 |
| WV-3545 | 7178.43622 | 7178 |
| WV-3546 | 7294.59604 | 7295 |

*Calculated and found mass data of WV-2531 and WV-3152 are for sodium adducts.

[1407] In some embodiments, the present disclosure provides CpG oligonucleotides and oligonucleotide compositions that are chirally controlled. For instance, in some embodiments, a provided composition contains predetermined levels of one or more individual CpG oligonucleotide types, wherein a CpG oligonucleotide type is defined by: 1) base sequence; 2) pattern of backbone linkages; 3) pattern of backbone chiral centers; and 4) pattern of backbone P-modifications. In some embodiments, a particular CpG oligonucleotide type can be defined by 1A) base identity; 1B) pattern of base modification; 1C) pattern of sugar modification; 2) pattern of backbone linkages; 3) pattern of backbone chiral centers; and 4) pattern of backbone P-modifications. In some embodiments, CpG oligonucleotides of the same CpG oligonucleotide type are identical.

[1408] In some embodiments, a provided CpG oligonucleotide is a hemimer. In some embodiments, a hemimer is a CpG oligonucleotide wherein the 5′-end or the 3′-end has a sequence that possesses a structure feature that the rest of the CpG oligonucleotide does not have. In some embodiments, the 5′-end or the 3′-end has or comprises 2 to 20 nucleotides. In some embodiments, a structural feature is a base modification. In some embodiments, a structural feature is a sugar modification. In some embodiments, a structural feature is a P-modification. In some embodiments, a structural feature is stereochemistry of the chiral internucleotidic linkage. In some embodiments, a structural feature is or comprises a base modification, a sugar modification, a P-modification, or stereochemistry of the chiral internucleotidic linkage, or combinations thereof. In some embodiments, a hemimer is a CpG oligonucleotide in which each sugar moiety of the 5′-end sequence shares a common modification. In some embodiments, a hemimer is a CpG oligonucleotide in which each sugar moiety of the 3′-end sequence shares a common modification. In some embodiments, a common sugar modification of the 5′ or 3′ end sequence is not shared by any other sugar moieties in the CpG oligonucleotide. In some embodiments, an example hemimer is a CpG oligonucleotide comprising a sequence of substituted or unsubstituted 2′-O-alkyl sugar modified nucleosides, bicyclic sugar modified nucleosides, β-D-ribonucleosides or β-D-deoxyribonucleosides (for example 2′-MOE modified nucleosides, and LNA™ or ENA™ bicyclic syugar modified nucleosides) at one terminus and a sequence of nucleosides with a different sugar moiety (such as a substituted or unsubstituted 2′-O-alkyl sugar modified nucleosides, bicyclic sugar modified nucleosides or natural ones) at the other terminus. In some embodiments, a provided CpG oligonucleotide is a combination of one or more of unimer, altmer, blockmer, gapmer, hemimer and skipmer. In some embodiments, a provided CpG oligonucleotide is a combination of one or more of unimer, altmer, blockmer, gapmer, and skipmer. For instance, in some embodiments, a provided CpG oligonucleotide is both an altmer and a gapmer. In some embodiments, a provided nucleotide is both a gapmer and a skipmer. One of skill in the chemical and synthetic arts will recognize that numerous other combinations of patterns are available and are limited only by the commercial availability and/or synthetic accessibility of constituent parts required to synthesize a provided CpG oligonucleotide in accordance with methods of the present disclosure. In some embodiments, a hemimer structure provides advantageous benefits. In some embodiments, provided CpG oligonucleotides are 5′-hemmimers that comprises modified sugar moieties in a 5′-end sequence. In some embodiments, provided CpG oligonucleotides are 5′-hemmimers that comprises modified 2′-sugar moieties in a 5′-end sequence.

[1409] In some embodiments, a provided CpG oligonucleotide comprises one or more optionally substituted nucleotides. In some embodiments, a provided CpG oligonucleotide comprises one or more modified nucleotides. In some embodiments, a provided CpG oligonucleotide comprises one or more optionally substituted nucleosides. In some embodiments, a provided CpG oligonucleotide comprises one or more modified nucleosides. In some embodiments, a provided CpG oligonucleotide comprises one or more optionally substituted LNAs.

[1410] In some embodiments, a provided CpG oligonucleotide comprises one or more optionally substituted nucleobases. In some embodiments, a provided CpG oligonucleotide comprises one or more optionally substituted natural nucleobases. In some embodiments, a provided CpG oligonucleotide comprises one or more optionally substituted modified nucleobases. In some embodiments, a provided CpG oligonucleotide comprises one or more 5-methylcytidine; 5-hydroxymethylcytidine, 5-formylcytosine, or 5-carboxylcytosine. In some embodiments, a provided CpG oligonucleotide comprises one or more 5-methylcytidine.

[1411] In some embodiments, a provided CpG oligonucleotide comprises one or more optionally substituted sugars. In some embodiments, a provided CpG oligonucleotide comprises one or more optionally substituted sugars found in naturally occurring DNA and RNA. In some embodiments, a provided CpG oligonucleotide comprises one or more optionally substituted ribose or deoxyribose. In some embodiments, a provided CpG oligonucleotide comprises one or more optionally substituted ribose or deoxyribose, wherein one or more hydroxyl groups of the ribose or deoxyribose moiety is optionally and independently replaced by halogen, R′, —N(R′)₂, —OR′, or —SR′, wherein each R′ is independently as defined above and described herein. In some embodiments, a provided CpG oligonucleotide comprises one or more optionally substituted deoxyribose, wherein the 2′ position of the deoxyribose is optionally and independently substituted with halogen, R′, —N(R′)₂, —OR′, or —SR′, wherein each R′ is independently as defined above and described herein. In some embodiments, a provided CpG oligonucleotide comprises one or more optionally substituted deoxyribose, wherein the 2′ position of the deoxyribose is optionally and independently substituted with halogen. In some embodiments, a provided CpG oligonucleotide comprises one or more optionally substituted deoxyribose, wherein the 2′ position of the deoxyribose is optionally and independently substituted with one or more —F. halogen. In some embodiments, a provided CpG oligonucleotide comprises one or more optionally substituted deoxyribose, wherein the 2′ position of the deoxyribose is optionally and independently substituted with —OR′, wherein each R′ is independently as defined above and described herein. In some embodiments, a provided CpG oligonucleotide comprises one or more optionally substituted deoxyribose, wherein the 2′ position of the deoxyribose is optionally and independently substituted with —OR′, wherein each R′ is independently an optionally substituted C₁-C₆ aliphatic. In some embodiments, a provided CpG oligonucleotide comprises one or more optionally substituted deoxyribose, wherein the 2′ position of the deoxyribose is optionally and independently substituted with —OR′, wherein each R′ is independently an optionally substituted C₁-C₆ alkyl. In some embodiments, a provided CpG oligonucleotide comprises one or more optionally substituted deoxyribose, wherein the 2′ position of the deoxyribose is optionally and independently substituted with —OMe. In some embodiments, a provided CpG oligonucleotide comprises one or more optionally substituted deoxyribose, wherein the 2′ position of the deoxyribose is optionally and independently substituted with —O-methoxyethyl.

[1412] In some embodiments, a provided CpG oligonucleotide is single-stranded CpG oligonucleotide.

[1413] In some embodiments, a provided CpG oligonucleotide is a hybridized oligonucleotide strand. In certain embodiments, a provided CpG oligonucleotide is a partially hybridized CpG oligonucleotide strand. In certain embodiments, a provided CpG oligonucleotide is a completely hybridized CpG oligonucleotide strand. In certain embodiments, a provided CpG oligonucleotide is a double-stranded CpG oligonucleotide. In certain embodiments, a provided CpG oligonucleotide is a triple-stranded CpG oligonucleotide (e.g., a triplex).

[1414] In some embodiments, a provided CpG oligonucleotide is chimeric. For example, in some embodiments, a provided CpG oligonucleotide is DNA-RNA chimera, DNA-LNA chimera, etc. In some embodiments, one or both wings can comprise LNA, and the core can comprise phosphorothioate. In some embodiments, the CpG oligonucleotide can comprise a format (e.g., architecture) of wing-core-wing which is LNA-phosphorothioate-LNA.

[1415] In some embodiments, any one of the structures comprising a CpG oligonucleotide depicted in WO2012/030683 can be modified in accordance with methods of the present disclosure to provide chirally controlled variants thereof. For example, in some embodiments the chirally controlled variants comprise a stereochemical modification at any one or more of the linkage phosphorus and/or a P-modification at any one or more of the linkage phosphorus. For example, in some embodiments, a particular nucleotide unit of a CpG oligonucleotide of WO2012/030683 is preselected to be stereochemically modified at the linkage phosphorus of that nucleotide unit and/or P-modified at the linkage phosphorus of that nucleotide unit.

[1416] In some embodiments, a provided CpG oligonucleotide is a therapeutic agent.

[1417] In some embodiments, a provided CpG oligonucleotide is an antisense oligonucleotide.

[1418] In some embodiments, a provided CpG oligonucleotide is an antigene oligonucleotide.

[1419] In some embodiments, a provided CpG oligonucleotide is a decoy oligonucleotide.

[1420] In some embodiments, a provided CpG oligonucleotide is part of a DNA vaccine.

[1421] In some embodiments, a provided CpG oligonucleotide is an immunomodulatory oligonucleotide, e.g., immunostimulatory oligonucleotide and immunoinhibitory oligonucleotide.

[1422] In some embodiments, a provided CpG oligonucleotide is an adjuvant.

[1423] In some embodiments, a provided CpG oligonucleotide is an aptamer.

[1424] In some embodiments, a provided CpG oligonucleotide is a ribozyme.

[1425] In some embodiments, a provided CpG oligonucleotide is a deoxyribozyme (DNAzymes or DNA enzymes).

[1426] In some embodiments, a provided CpG oligonucleotide is an siRNA.

[1427] In some embodiments, a provided CpG oligonucleotide is a microRNA, or miRNA.

[1428] In some embodiments, a provided CpG oligonucleotide is a ncRNA (non-coding RNAs), including a long non-coding RNA (lncRNA) and a small non-coding RNA, such as piwi-interacting RNA (piRNA).

[1429] In some embodiments, a provided CpG oligonucleotide is complementary to a structural RNA, e.g., tRNA.

[1430] In some embodiments, a provided CpG oligonucleotide is a nucleic acid analog, e.g., GNA, LNA, PNA, TNA and Morpholino.

[1431] In some embodiments, a provided CpG oligonucleotide is a P-modified prodrug.

[1432] In some embodiments, a provided CpG oligonucleotide is a primer. In some embodiments, a primers is for use in polymerase-based chain reactions (i.e., PCR) to amplify nucleic acids. In some embodiments, a primer is for use in any known variations of PCR, such as reverse transcription PCR (RT-PCR) and real-time PCR.

[1433] In some embodiments, a provided CpG oligonucleotide is characterized as having the ability to modulate RNase H activation. For example, in some embodiments, RNase H activation is modulated by the presence of stereocontrolled phosphorothioate nucleic acid analogs, with natural DNA/RNA being more or equally susceptible than the Rp stereoisomer, which in turn is more susceptible than the corresponding Sp stereoisomer.

[1434] In some embodiments, a provided CpG oligonucleotide is characterized as having the ability to indirectly or directly increase or decrease activity of a protein or inhibition or promotion of the expression of a protein. In some embodiments, a provided CpG oligonucleotide is characterized in that it is useful in the control of cell proliferation, viral replication, and/or any other cell signaling process.

[1435] In some embodiments, a provided CpG oligonucleotide is from about 2 to about 200 nucleotide units in length. In some embodiments, a provided CpG oligonucleotide is from about 2 to about 180 nucleotide units in length. In some embodiments, a provided CpG oligonucleotide is from about 2 to about 160 nucleotide units in length. In some embodiments, a provided CpG oligonucleotide is from about 2 to about 140 nucleotide units in length. In some embodiments, a provided CpG oligonucleotide is from about 2 to about 120 nucleotide units in length. In some embodiments, a provided CpG oligonucleotide is from about 2 to about 100 nucleotide units in length. In some embodiments, a provided CpG oligonucleotide is from about 2 to about 90 nucleotide units in length. In some embodiments, a provided CpG oligonucleotide is from about 2 to about 80 nucleotide units in length. In some embodiments, a provided CpG oligonucleotide is from about 2 to about 70 nucleotide units in length. In some embodiments, a provided CpG oligonucleotide is from about 2 to about 60 nucleotide units in length. In some embodiments, a provided CpG oligonucleotide is from about 2 to about 50 nucleotide units in length. In some embodiments, a provided CpG oligonucleotide is from about 2 to about 40 nucleotide units in length. In some embodiments, a provided CpG oligonucleotide is from about 2 to about 30 nucleotide units in length. In some embodiments, a provided CpG oligonucleotide is from about 2 to about 29 nucleotide units in length. In some embodiments, a provided CpG oligonucleotide is from about 2 to about 28 nucleotide units in length. In some embodiments, a provided CpG oligonucleotide is from about 2 to about 27 nucleotide units in length. In some embodiments, a provided CpG oligonucleotide is from about 2 to about 26 nucleotide units in length. In some embodiments, a provided CpG oligonucleotide is from about 2 to about 25 nucleotide units in length. In some embodiments, a provided CpG oligonucleotide is from about 2 to about 24 nucleotide units in length. In some embodiments, a provided CpG oligonucleotide is from about 2 to about 23 nucleotide units in length. In some embodiments, a provided CpG oligonucleotide is from about 2 to about 22 nucleotide units in length. In some embodiments, a provided CpG oligonucleotide is from about 2 to about 21 nucleotide units in length. In some embodiments, a provided CpG oligonucleotide is from about 2 to about 20 nucleotide units in length.

[1436] In some embodiments, a provided CpG oligonucleotide is from about 4 to about 200 nucleotide units in length. In some embodiments, a provided CpG oligonucleotide is from about 4 to about 180 nucleotide units in length. In some embodiments, a provided CpG oligonucleotide is from about 4 to about 160 nucleotide units in length. In some embodiments, a provided CpG oligonucleotide is from about 4 to about 140 nucleotide units in length. In some embodiments, a provided CpG oligonucleotide is from about 4 to about 120 nucleotide units in length. In some embodiments, a provided CpG oligonucleotide is from about 4 to about 100 nucleotide units in length. In some embodiments, a provided CpG oligonucleotide is from about 4 to about 90 nucleotide units in length. In some embodiments, a provided CpG oligonucleotide is from about 4 to about 80 nucleotide units in length. In some embodiments, a provided CpG oligonucleotide is from about 4 to about 70 nucleotide units in length. In some embodiments, a provided CpG oligonucleotide is from about 4 to about 60 nucleotide units in length. In some embodiments, a provided CpG oligonucleotide is from about 4 to about 50 nucleotide units in length. In some embodiments, a provided CpG oligonucleotide is from about 4 to about 40 nucleotide units in length. In some embodiments, a provided CpG oligonucleotide is from about 4 to about 30 nucleotide units in length. In some embodiments, a provided CpG oligonucleotide is from about 4 to about 29 nucleotide units in length. In some embodiments, a provided CpG oligonucleotide is from about 4 to about 28 nucleotide units in length. In some embodiments, a provided CpG oligonucleotide is from about 4 to about 27 nucleotide units in length. In some embodiments, a provided CpG oligonucleotide is from about 4 to about 26 nucleotide units in length. In some embodiments, a provided CpG oligonucleotide is from about 4 to about 25 nucleotide units in length. In some embodiments, a provided CpG oligonucleotide is from about 4 to about 24 nucleotide units in length. In some embodiments, a provided CpG oligonucleotide is from about 4 to about 23 nucleotide units in length. In some embodiments, a provided CpG oligonucleotide is from about 4 to about 22 nucleotide units in length. In some embodiments, a provided CpG oligonucleotide is from about 4 to about 21 nucleotide units in length. In some embodiments, a provided CpG oligonucleotide is from about 4 to about 20 nucleotide units in length.

[1437] In some embodiments, a provided CpG oligonucleotide is from about 5 to about 10 nucleotide units in length. In some embodiments, a provided CpG oligonucleotide is from about 10 to about 30 nucleotide units in length. In some embodiments, a provided CpG oligonucleotide is from about 15 to about 25 nucleotide units in length. In some embodiments, a provided CpG oligonucleotide is from about 5, 6, 7, 8, 9, 10, 11, 12, 13, 14, 15, 16, 17, 18, 19, 20, 21, 22, 23, 24, or 25 nucleotide units in length.

[1438] In some embodiments, a CpG oligonucleotide is at least 2 nucleotide units in length. In some embodiments, a CpG oligonucleotide is at least 3 nucleotide units in length. In some embodiments, a CpG oligonucleotide is at least 4 nucleotide units in length. In some embodiments, a CpG oligonucleotide is at least 5 nucleotide units in length. In some embodiments, a CpG oligonucleotide is at least 6 nucleotide units in length. In some embodiments, a CpG oligonucleotide is at least 7 nucleotide units in length. In some embodiments, a CpG oligonucleotide is at least 8 nucleotide units in length. In some embodiments, a CpG oligonucleotide is at least 9 nucleotide units in length. In some embodiments, a CpG oligonucleotide is at least 10 nucleotide units in length. In some embodiments, a CpG oligonucleotide is at least 11 nucleotide units in length. In some embodiments, a CpG oligonucleotide is at least 12 nucleotide units in length. In some embodiments, a CpG oligonucleotide is at least 13 nucleotide units in length. In some embodiments, a CpG oligonucleotide is at least 14 nucleotide units in length. In some embodiments, a CpG oligonucleotide is at least 15 nucleotide units in length. In some embodiments, a CpG oligonucleotide is at least 16 nucleotide units in length. In some embodiments, a CpG oligonucleotide is at least 17 nucleotide units in length. In some embodiments, a CpG oligonucleotide is at least 18 nucleotide units in length. In some embodiments, a CpG oligonucleotide is at least 19 nucleotide units in length. In some embodiments, a CpG oligonucleotide is at least 20 nucleotide units in length. In some embodiments, a CpG oligonucleotide is at least 21 nucleotide units in length. In some embodiments, a CpG oligonucleotide is at least 22 nucleotide units in length. In some embodiments, a CpG oligonucleotide is at least 23 nucleotide units in length. In some embodiments, a CpG oligonucleotide is at least 24 nucleotide units in length. In some embodiments, a CpG oligonucleotide is at least 25 nucleotide units in length. In some other embodiments, a CpG oligonucleotide is at least 30 nucleotide units in length. In some other embodiments, a CpG oligonucleotide is a duplex of complementary strands of at least 18 nucleotide units in length. In some other embodiments, a CpG oligonucleotide is a duplex of complementary strands of at least 21 nucleotide units in length.

[1439] In some embodiments, the 5′-end and/or the 3′-end of a provided CpG oligonucleotide is modified. In some embodiments, the 5′-end and/or the 3′-end of a provided CpG oligonucleotide is modified with a terminal cap moiety. Example such modifications, including terminal cap moieties are extensively described herein and in the art, for example but not limited to those described in US Patent Application Publication US 2009/0023675A1.

[1440] In some embodiments, CpG oligonucleotides of a CpG oligonucleotide type characterized by 1) a common base sequence and length, 2) a common pattern of backbone linkages, and 3) a common pattern of backbone chiral centers, have the same chemical structure. For example, they have the same base sequence, the same pattern of nucleoside modifications, the same pattern of backbone linkages (i.e., pattern of internucleotidic linkage types, for example, phosphate, phosphorothioate, etc.), the same pattern of backbone chiral centers (i.e. pattern of linkage phosphorus stereochemistry (Rp/Sp)), and the same pattern of backbone phosphorus modifications (e.g., pattern of “—XLR¹” groups in formula I).

[1441] The present disclosure provides compositions comprising or consisting of a plurality of provided CpG oligonucleotides (e.g., chirally controlled CpG oligonucleotide compositions). In some embodiments, all such provided CpG oligonucleotides are of the same type, i.e., all have the same base sequence, pattern of backbone linkages (i.e., pattern of internucleotidic linkage types, for example, phosphate, phosphorothioate, etc.), pattern of backbone chiral centers (i.e. pattern of linkage phosphorus stereochemistry (Rp/Sp)), and pattern of backbone phosphorus modifications (e.g., pattern of “—XLR¹” groups in formula I). In some embodiments, all CpG oligonucleotides of the same type are identical. In many embodiments, however, provided compositions comprise a plurality of CpG oligonucleotides types, typically in pre-determined relative amounts.

[1442] In some embodiments, a provided chirally controlled CpG oligonucleotide composition comprises a combination of one or more provided CpG oligonucleotide types. One of skill in the chemical and medicinal arts will recognize that the selection and amount of each of the one or more types of provided CpG oligonucleotides in a provided composition will depend on the intended use of that composition. That is to say, one of skill in the relevant arts would design a provided chirally controlled CpG oligonucleotide composition such that the amounts and types of provided CpG oligonucleotides contained therein cause the composition as a whole to have certain desirable characteristics (e.g., biologically desirable, therapeutically desirable, etc.).

[1443] In some embodiments, a provided chirally controlled CpG oligonucleotide composition comprises a combination of two or more provided CpG oligonucleotide types. In some embodiments, a provided chirally controlled CpG oligonucleotide composition comprises a combination of three or more provided CpG oligonucleotide types. In some embodiments, a provided chirally controlled CpG oligonucleotide composition comprises a combination of four or more provided CpG oligonucleotide types. In some embodiments, a provided chirally controlled CpG oligonucleotide composition comprises a combination of five or more provided CpG oligonucleotide types. In some embodiments, a provided chirally controlled CpG oligonucleotide composition comprises a combination of six or more provided CpG oligonucleotide types. In some embodiments, a provided chirally controlled CpG oligonucleotide composition comprises a combination of seven or more provided CpG oligonucleotide types. In some embodiments, a provided chirally controlled CpG oligonucleotide composition comprises a combination of eight or more provided CpG oligonucleotide types. In some embodiments, a provided chirally controlled CpG oligonucleotide composition comprises a combination of nine or more provided CpG oligonucleotide types. In some embodiments, a provided chirally controlled CpG oligonucleotide composition comprises a combination of ten or more provided CpG oligonucleotide types. In some embodiments, a provided chirally controlled CpG oligonucleotide composition comprises a combination of fifteen or more provided CpG oligonucleotide types.

[1444] In some embodiments, a provided chirally controlled CpG oligonucleotide composition is a combination of an amount of chirally uniform mipomersen of the Rp configuration and an amount of chirally uniform mipomersen of the Sp configuration.

[1445] In some embodiments, a provided chirally controlled CpG oligonucleotide composition is a combination of an amount of chirally uniform mipomersen of the Rp configuration, an amount of chirally uniform mipomersen of the Sp configuration, and an amount of one or more chirally pure mipomersen of a desired diastereomeric form.

[1446] In some embodiments, a provided CpG oligonucleotide type is selected from those produced by a method described in WO/2014/012081 and WO/2015/107425, the CpG oligonucleotides, CpG oligonucleotide types, CpG oligonucleotide compositions, and methods thereof of each of which are incorporated herein by reference. In some embodiments, a provided chirally controlled CpG oligonucleotide composition comprises CpG oligonucleotides of a CpG oligonucleotide type selected from those produced by a method described in WO/2014/012081 and WO/2015/107425.

[1447] In some embodiments, oligonucleotides, e.g., oligonucleotides of a plurality, oligonucleotides of a type, etc., or provided compounds, are of predetermined levels in compositions. In some embodiments, a predetermined level of oligonucleotides is at least 1%, 5%, 10%, 15%, 20%, 25%, 30%, 35%, 40%, 45%, 50%, 55%, 60%, 65%, 70%, 75%, 80%, 85%, 90%, 91%, 92%, 93%, 94%, 95%, 96%, 97%, 98%, or 99% of all oligonucleotides in a provided composition. In some embodiments, a predetermined level of oligonucleotides is at least 1%, 5%, 10%, 15%, 20%, 25%, 30%, 35%, 40%, 45%, 50%, 55%, 60%, 65%, 70%, 75%, 80%, 85%, 90%, 91%, 92%, 93%, 94%, 95%, 96%, 97%, 98%, or 99% of all oligonucleotides in a provided composition that are of or comprise a common base sequence. In some embodiments, all oligonucleotides in a provided composition that are of or comprise a common base sequence are at least 1%, 5%, 10%, 15%, 20%, 25%, 30%, 35%, 40%, 45%, 50%, 55%, 60%, 65%, 70%, 75%, 80%, 85%, 90%, 91%, 92%, 93%, 94%, 95%, 96%, 97%, 98%, or 99% of all oligonucleotides in the composition. In some embodiments, a predetermined level of oligonucleotides is at least 1%, 5%, 10%, 15%, 20%, 25%, 30%, 35%, 40%, 45%, 50%, 55%, 60%, 65%, 70%, 75%, 80%, 85%, 90%, 91%, 92%, 93%, 94%, 95%, 96%, 97%, 98%, or 99% of all oligonucleotides in a provided composition that are of or comprise a common base sequence, base modification, sugar modification and/or modified internucleotidic linkage. In some embodiments, all oligonucleotides in a provided composition that are of or comprise a common base sequence, base modification, sugar modification and/or modified internucleotidic linkage are at least 1%, 5%, 10%, 15%, 20%, 25%, 30%, 35%, 40%, 45%, 50%, 55%, 60%, 65%, 70%, 75%, 80%, 85%, 90%, 91%, 92%, 93%, 94%, 95%, 96%, 97%, 98%, or 99% of all oligonucleotides in the composition. In some embodiments, a predetermined level of oligonucleotides is at least 1%, 5%, 10%, 15%, 20%, 25%, 30%, 35%, 40%, 45%, 50%, 55%, 60%, 65%, 70%, 75%, 80%, 85%, 90%, 91%, 92%, 93%, 94%, 95%, 96%, 97%, 98%, or 99% of all oligonucleotides in a provided composition that are of or comprise a common base sequence, pattern of base modification, pattern of sugar modification, and/or pattern of modified internucleotidic linkage. In some embodiments, all oligonucleotides in a provided composition that are of or comprise a common base sequence, pattern of base modification, pattern of sugar modification, and/or pattern of modified internucleotidic linkage are at least 1%, 5%, 10%, 15%, 20%, 25%, 30%, 35%, 40%, 45%, 50%, 55%, 60%, 65%, 70%, 75%, 80%, 85%, 90%, 91%, 92%, 93%, 94%, 95%, 96%, 97%, 98%, or 99% of all oligonucleotides in the composition. In some embodiments, a predetermined level of oligonucleotides is at least 1%, 5%, 10%, 15%, 20%, 25%, 30%, 35%, 40%, 45%, 50%, 55%, 60%, 65%, 70%, 75%, 80%, 85%, 90%, 91%, 92%, 93%, 94%, 95%, 96%, 97%, 98%, or 99% of all oligonucleotides in a provided composition that share a common base sequence, a common pattern of base modification, a common pattern of sugar modification, and/or a common pattern of modified internucleotidic linkages. In some embodiments, all oligonucleotides in a provided composition that share a common base sequence, a common pattern of base modification, a common pattern of sugar modification, and/or a common pattern of modified internucleotidic linkages are at least 1%, 5%, 10%, 15%, 20%, 25%, 30%, 35%, 40%, 45%, 50%, 55%, 60%, 65%, 70%, 75%, 80%, 85%, 90%, 91%, 92%, 93%, 94%, 95%, 96%, 97%, 98%, or 99% of all oligonucleotides in the composition. In some embodiments, a predetermined level is 1-100%. In some embodiments, a predetermined level is at least 1%. In some embodiments, a predetermined level is at least 5%. In some embodiments, a predetermined level is at least 10%. In some embodiments, a predetermined level is at least 20%. In some embodiments, a predetermined level is at least 30%. In some embodiments, a predetermined level is at least 40%. In some embodiments, a predetermined level is at least 50%. In some embodiments, a predetermined level is at least 60%. In some embodiments, a predetermined level is at least 10%. In some embodiments, a predetermined level is at least 70%. In some embodiments, a predetermined level is at least 80%. In some embodiments, a predetermined level is at least 90%. In some embodiments, a predetermined level is at least 5*(½^{g}), wherein g is the number of chirally controlled internucleotidic linkages. In some embodiments, a predetermined level is at least 10*(½^{g}), wherein g is the number of chirally controlled internucleotidic linkages. In some embodiments, a predetermined level is at least 100*(½^{g}), wherein g is the number of chirally controlled internucleotidic linkages. In some embodiments, a predetermined level is at least (0.8)^{g}, wherein g is the number of chirally controlled internucleotidic linkages. In some embodiments, a predetermined level is at least (0.8)^{g}, wherein g is the number of chirally controlled internucleotidic linkages. In some embodiments, a predetermined level is at least (0.8)^{g}, wherein g is the number of chirally controlled internucleotidic linkages. In some embodiments, a predetermined level is at least (0.8)^{g}, wherein g is the number of chirally controlled internucleotidic linkages. In some embodiments, a predetermined level is at least (0.9)^{g}, wherein g is the number of chirally controlled internucleotidic linkages. In some embodiments, a predetermined level is at least (0.9)^{g}, wherein g is the number of chirally controlled internucleotidic linkages. In some embodiments, a predetermined level is at least (0.96)^{g}, wherein g is the number of chirally controlled internucleotidic linkages. In some embodiments, a predetermined level is at least (0.9)^{g}, wherein g is the number of chirally controlled internucleotidic linkages. In some embodiments, a predetermined level is at least (0.98)^{g}, wherein g is the number of chirally controlled internucleotidic linkages. In some embodiments, a predetermined level is at least (0.9)^{g}, wherein g is the number of chirally controlled internucleotidic linkages. In some embodiments, to determine level of oligonucleotides having g chirally controlled internucleotidic linkages in a composition, product of diastereopurity of each of the g chirally controlled internucleotidic linkages: (diastereopurity of chirally controlled internucleotidic linkage 1)* (diastereopurity of chirally controlled internucleotidic linkage 2)* . . . *(diastereopurity of chirally controlled internucleotidic linkage g) is utilized as the level, wherein diastereopurity of each chirally controlled internucleotidic linkage is independently represented by diastereopurity of a dimer comprising the same internucleotidic linkage and nucleosides flanking the internucleotidic linkage and prepared under comparable methods as the oligonucleotides (e.g., comparable or preferably identical oligonucleotide preparation cycles, including comparable or preferably identical reagents and reaction conditions). In some embodiments, levels of oligonucleotides and/or diastereopurity can be determined by analytical methods, e.g., chromatographic, spectrometric, spectroscopic methods or any combinations thereof.

[1448] In some embodiments, provided oligonucleotides may exist as salts, for example, provided oligonucleotides may exist as metal and/or ammonium (—N(R)₃⁺) salts in weakly acidic, neutral or basic aqueous solutions, etc. In some embodiments, a salt is a pharmaceutically acceptable salt. In some embodiments, a provided salt may be formulated as a solid as tablet, powder, etc. In some embodiments, a salt, e.g., a pharmaceutically acceptable salt, of a provided oligonucleotide comprises two or more cations, which can be the same or different. In some embodiments, in a salt e.g., a pharmaceutically acceptable salt, all ionizable hydrogen in the acidic groups are replaced with cations. In some embodiments, each hydrogen ion that may be donated to a base (e.g., under conditions of an aqueous solution, a pharmaceutical composition, etc.) is replaced by a non-H⁺ cation. For example, in some embodiments, a pharmaceutically acceptable salt of an oligonucleotide is an all-metal ion salt, wherein each hydrogen ion (for example, of —OH, —SH, etc.) of each linkage (e.g., a natural phosphate linkage, a phosphorothioate diester linkage, etc.) is replaced by a metal ion. In some embodiments, a provided salt is an all-sodium salt. In some embodiments, a provided pharmaceutically acceptable salt is an all-sodium salt. For example, a sodium salt of WV-3473 containing 19 Na⁺; a sodium salt of WV-3545 containing 20 Na+; etc. In some embodiments, a provided salt is an all-sodium salt, wherein each linkage which is a natural phosphate linkage (acid form —O—P(O)(OH)—O—), if any, exists as its sodium salt form (—O—P(O)(ONa)—O—), and each linkage which is a phosphorothioate diester linkage (acid form —O—P(O)(SH)—O—), if any, exists as its sodium salt form (—O—P(O)(SNa)—O—).

### Certain Biological Applications and Use

[1449] As described herein, provided compositions and methods are capable of altering splicing of transcripts. In some embodiments, provided compositions and methods provide improved splicing patterns of transcripts compared to a reference pattern, which is a pattern from a reference condition selected from the group consisting of absence of the composition, presence of a reference composition, and combinations thereof. An improvement can be an improvement of any desired biological functions. In some embodiments, for example, in Duchenne muscular dystrophy (DMD), an improvement is production of an mRNA from which a dystrophin protein with improved biological activities is produced. In some other embodiments, for example, an improvement is down-regulation of STAT3, HNRNPH1 and/or KDR to mitigate tumor progression, malignancy, and angiogenesis through forced splicing-induced nonsense-mediated decay (DSD-NMD).

[1450] In some embodiments, the present disclosure provides a method for altering splicing of a target transcript, comprising administering a composition comprising a first plurality of CpG oligonucleotides, wherein the splicing of the target transcript is altered relative to reference conditions selected from the group consisting of absence of the composition, presence of a reference composition, and combinations thereof.

[1451] As widely known in the art, many diseases and/or conditions are associated with transcript splicing. For examples, see Garcia-Blanco, et al., Alternative splicing in disease and therapy, Nat. Biotechnol. 2004 May; 22(5):535-46; Wang, et al., Splicing in disease: disruption of the splicing code and the decoding machinery, Nat. Rev. Genet. 2007 October; 8(10):749-61; Havens, et al., Targeting RNA splicing for disease therapy, Wiley Interdiscip. Rev. RNA. 2013 May-June; 4(3):247-66; Perez, et al., Antisense mediated splicing modulation for inherited metabolic diseases: challenges for delivery, Nucleic Acid Ther. 2014 February; 24(1):48-56; etc. Additional example targets and/or disease are described in Xiong, et al., The human splicing code reveals new insights into the genetic determinants of disease, Science. 2015 Jan. 9; 347(6218):1254806. doi: 10.1126/science.1254806. In some embodiments, the present disclosure provides compositions and methods for treating or preventing diseases, including but not limited to those described in references cited in this disclosure.

[1452] In some embodiments, the present disclosure provides a method for treating or preventing a disease, comprising administering to a subject a CpG oligonucleotide composition described herein.

[1453] In some embodiments, the present disclosure provides a method for treating or preventing a disease, comprising administering to a subject a CpG oligonucleotide composition comprising a first plurality of CpG oligonucleotides of a particular CpG oligonucleotide type defined by:
[1454] 1) base sequence;
[1455] 2) pattern of backbone linkages;
[1456] 3) pattern of backbone chiral centers; and
[1457] 4) pattern of backbone phosphorus modifications,
   which composition is chirally controlled in that it is enriched, relative to a substantially racemic preparation of CpG oligonucleotides having the same base sequence, for CpG oligonucleotides of the particular CpG oligonucleotide type, wherein:
[1458] the CpG oligonucleotide composition being characterized in that, when it is contacted with the transcript in a transcript splicing system, splicing of the transcript is altered relative to that observed under reference conditions selected from the group consisting of absence of the composition, presence of a reference composition, and combinations thereof.

[1459] In some embodiments, a disease is one in which, after administering a provided composition, one or more spliced transcripts repair, a gene is effectively knockdown by altering splicing of the gene transcript.

[1460] In some embodiments, a disease is Duchenne muscular dystrophy. In some embodiments, a disease is spinal muscular atrophy. In some embodiments, a disease is cancer.

[1461] In some embodiments, the present disclosure provides a method of treating a disease by administering a composition comprising a first plurality of CpG oligonucleotides sharing a common base sequence comprising a common base sequence, which nucleotide sequence is complementary to a target sequence in the target transcript, the improvement that comprises using as the CpG oligonucleotide composition a stereocontrolled CpG oligonucleotide composition characterized in that when it is contacted with the transcript in a transcript splicing system, splicing of the transcript is altered relative to that observed under reference conditions selected from the group consisting of absence of the composition, presence of a reference composition, and combinations thereof.

[1462] In some embodiments, the present disclosure provides a method of treating a disease by administering a composition comprising a first plurality of CpG oligonucleotides sharing a common base sequence comprising a common base sequence, which nucleotide sequence is complementary to a target sequence in the target transcript, the improvement that comprises using as the CpG oligonucleotide composition a stereocontrolled CpG oligonucleotide composition characterized in that when it is contacted with the transcript in a transcript splicing system, splicing of the transcript is altered relative to that observed under reference conditions selected from the group consisting of absence of the composition, presence of a reference composition, and combinations thereof.

[1463] In some embodiments, sequence of provide CpG oligonucleotides is or comprises an element that is substantially complementary to a targeted element in a cellular nucleic acid. In some embodiments, a sequence is or comprises a sequence element that is associated with a muscle disease, disorder or condition. In some embodiments, a cellular nucleic acid is or comprises a transcript. In some embodiments, a cellular nucleic acid is or comprises a primary transcript. In some embodiments, a cellular nucleic acid is RNA. In some embodiments, a cellular nucleic acid is pre-mRNA. In some embodiments, a cellular nucleic acid is mRNA. In some embodiments, a cellular nucleic acid is or comprises genomic nucleic acid. In some embodiments, a sequence is or comprises an element that is substantially complementary to a targeted an RNA, and provided CpG oligonucleotides of the sequence provide exon-skipping to form mRNA which are translated into proteins that have improved functions than proteins formed absence of the provided CpG oligonucleotides. In some embodiments, such proteins with improved activities can restore or partially restore one or more muscular functions and can be used for treatment of muscle diseases, disorders and/or conditions. In some embodiments, a provided CpG oligonucleotide composition is administered at a dose and/or frequency lower than that of an otherwise comparable reference CpG oligonucleotide composition with comparable effect in altering the splicing of a target transcript. In some embodiments, a stereocontrolled CpG oligonucleotide composition is administered at a dose and/or frequency lower than that of an otherwise comparable stereorandom reference CpG oligonucleotide composition with comparable effect in altering the splicing of the target transcript. If desired, a provided composition can also be administered at higher dose/frequency due to its lower toxicities.

[1464] In some embodiments, the present disclosure recognizes that properties, e.g., activities, toxicities, etc. of CpG oligonucleotides and compositions thereof can be optimized by chemical modifications and/or stereochemistry. In some embodiments, the present disclosure provides methods for optimizing oligonucleotide properties through chemical modifications and stereochemistry. In some embodiments, the present disclosure provides CpG oligonucleotides and compositions and methods thereof with low toxicities. In some embodiments, the present disclosure provides CpG oligonucleotides and compositions and methods thereof with low toxicities and enhanced activities (e.g., target-inhibition efficiency, specificity, cleavage rates, cleavage pattern, etc.). In some embodiments, the present disclosure provides CpG oligonucleotides and compositions and methods thereof with improved protein binding profile. In some embodiments, the present disclosure provides CpG oligonucleotides and compositions and methods thereof with improved protein binding profile and enhanced activities. In some embodiments, the present disclosure provides CpG oligonucleotides and compositions and methods thereof with improved delivery and enhanced activities.

[1465] In some embodiments, provided CpG oligonucleotides, compositions and methods have low toxicities, e.g., when compared to a reference composition. As widely known in the art, CpG oligonucleotides can induce toxicities when administered to, e.g., cells, tissues, organism, etc. In some embodiments, CpG oligonucleotides can induce undesired immune response. In some embodiments, CpG oligonucleotide can induce complement activation. In some embodiments, CpG oligonucleotides can induce activation of the alternative pathway of complement. In some embodiments, CpG oligonucleotides can induce inflammation. Among other things, the complement system has strong cytolytic activity that can damages cells and should therefore be modulated to reduce potential injuries. In some embodiments, CpG oligonucleotide-induced vascular injury is a recurrent challenge in the development of CpG oligonucleotides for e.g., pharmaceutical use. In some embodiments, a primary source of inflammation when high doses of CpG oligonucleotides are administered involves activation of the alternative complement cascade. In some embodiments, complement activation is a common challenge associated with phosphorothioate-containing CpG oligonucleotides, and there is also a potential of some sequences of phosphorothioates to induce innate immune cell activation. In some embodiments, cytokine release is associated with administration of CpG oligonucleotides. For example, in some embodiments, increases in interleukin-6 (IL-6) monocyte chemoattractant protein (MCP-1) and/or interleukin-12 (IL-12) is observed. See, e.g., Frazier, Antisense Oligonucleotide Therapies: The Promise and the Challenges from a Toxicologic Pathologist's Perspective. Toxicol Pathol., 43: 78-89, 2015; and Engelhardt, et al., Scientific and Regulatory Policy Committee Points-to-consider Paper: Drug-induced Vascular Injury Associated with Nonsmall Molecule Therapeutics in Preclinical Development: Part 2. Antisense CpG oligonucleotides. Toxicol Pathol. 43: 935-944, 2015.

[1466] By controlling of chemical modifications and/or stereochemistry, the present disclosure provides improved CpG oligonucleotide compositions and methods. In some embodiments, provided CpG oligonucleotides comprise chemical modifications. In some embodiments, provided CpG oligonucleotides comprise base modifications, sugar modifications, internucleotidic linkage modifications, or any combinations thereof. In some embodiments, provided CpG oligonucleotides comprise base modifications. In some embodiments, provided CpG oligonucleotides comprise sugar modifications. In some embodiments, provided CpG oligonucleotides comprises 2′-modifications on the sugar moieties. In some embodiments, the present disclosure demonstrates that 2′-modifications can lower toxicity. In some embodiments, provided CpG oligonucleotides comprises one or more modified internucleotidic linkages and one or more natural phosphate linkages. In some embodiments, the present disclosure demonstrates that incorporation of one or more natural phosphate linkages into CpG oligonucleotides comprising one or more modified internucleotidic linkages can lower toxicity. A natural phosphate linkage can be incorporated into various locations of a CpG oligonucleotide. In some embodiments, a natural phosphate linkage is incorporated into a wing region, or a region close to the 5′- or the 3′-end. In some embodiments, a natural phosphate linkage is incorporated into the middle of a CpG oligonucleotide. In some embodiments, a natural phosphate linkage is incorporated into a core region. In some embodiments, the present disclosure demonstrates that stereochemistry, either alone or in combination with chemical modifications, can modulate toxicity. In some embodiments, the present disclosure demonstrates that stereochemistry, either alone or in combination with chemical modifications, can modulate immune response. In some embodiments, the present disclosure demonstrates that stereochemistry, either alone or in combination with chemical modifications, can modulate complement activation. It is surprisingly found that a chirally controlled CpG oligonucleotide composition of an individual stereoisomer can have dramatically different toxicity profile, e.g., complement activation, compared to the corresponding stereorandom composition, and/or a chirally controlled CpG oligonucleotide composition of another individual stereoisomer. For examples, see FIGS. 1-5. In some embodiments, the present disclosure demonstrates that stereochemistry, either alone or in combination with chemical modifications, can modulate complement activation via the alternative pathway. Example chemical modifications, stereochemistry and patterns thereof are extensively described in this disclosure, and they can be used in combinations. Example compositions and methods of are also extensively described in this disclosure. A person having ordinary skill in the art understands that methods and compositions described herein can be used to either increase or decrease immune responses, including complement activation, relative to a reference composition.

[1467] In some embodiments, provided CpG oligonucleotides comprise one or more structural elements (e.g., modifications, stereochemistry, patterns, etc.) that CpG oligonucleotides of the reference plurality do not all have. Such structural elements can be any one described in this disclosure.

[1468] In some embodiments, CpG oligonucleotides of a provided composition comprise more phosphorothioate linkages than CpG oligonucleotides of the reference composition. In some embodiments, CpG oligonucleotides of a provided composition comprise more phosphorothioate linkages than CpG oligonucleotides of the reference composition at the 5′-end region. In some embodiments, CpG oligonucleotides of a provided composition comprise more phosphorothioate linkages than CpG oligonucleotides of the reference composition at the 3′-end region. In some embodiments, CpG oligonucleotides of a provided composition comprise more phosphorothioate linkages in a wing region than the corresponding region of CpG oligonucleotides of the reference composition. In some embodiments, CpG oligonucleotides of a provided composition comprise more phosphorothioate linkages in each wing region than the corresponding regions in CpG oligonucleotides of the reference composition. In some embodiments, CpG oligonucleotides of a provided composition comprise more Sp chiral internucleotidic linkages than CpG oligonucleotides of the reference composition. In some embodiments, CpG oligonucleotides of a provided composition comprise more Sp phosphorothioate linkages than CpG oligonucleotides of the reference composition. In some embodiments, CpG oligonucleotides of a provided composition comprise more Sp phosphorothioate linkages than CpG oligonucleotides of the reference composition at the 5′-end region. In some embodiments, CpG oligonucleotides of a provided composition comprise more Sp phosphorothioate linkages than CpG oligonucleotides of the reference composition at the 3′-end region. In some embodiments, CpG oligonucleotides of a provided composition comprise more Sp phosphorothioate linkages in a wing region than CpG oligonucleotides of the reference composition. In some embodiments, CpG oligonucleotides of a provided composition comprise more Sp phosphorothioate linkages in each wing region than CpG oligonucleotides of the reference composition. In some embodiments, CpG oligonucleotides of a provided composition comprise more modified bases than CpG oligonucleotides of the reference composition. In some embodiments, CpG oligonucleotides of a provided composition comprise more methylated bases than CpG oligonucleotides of the reference composition. In some embodiments, CpG oligonucleotides of a provided composition comprise more methylated bases than CpG oligonucleotides of the reference composition at the 5′-end region. In some embodiments, CpG oligonucleotides of a provided composition comprise more methylated bases than CpG oligonucleotides of the reference composition at the 3′-end region. In some embodiments, CpG oligonucleotides of a provided composition comprise more methylated bases than in a wing region than CpG oligonucleotides of the reference composition. In some embodiments, CpG oligonucleotides of a provided composition comprise more methylated bases than in each wing region than CpG oligonucleotides of the reference composition.

[1469] In some embodiments, CpG oligonucleotides of a provided composition comprise fewer 2′-MOE modifications than CpG oligonucleotides of the reference composition. In some embodiments, CpG oligonucleotides of a provided composition comprise fewer 2′-MOE modifications than CpG oligonucleotides of the reference composition. In some embodiments, CpG oligonucleotides of a provided composition comprise fewer 2′-MOE modifications than CpG oligonucleotides of the reference composition at the 5′-end region. In some embodiments, CpG oligonucleotides of a provided composition comprise fewer 2′-MOE modifications than CpG oligonucleotides of the reference composition at the 3′-end. In some embodiments, CpG oligonucleotides of a provided composition comprise fewer 2′-MOE modifications than in a wing region than CpG oligonucleotides of the reference composition. In some embodiments, CpG oligonucleotides of a provided composition comprise fewer 2′-MOE modifications than in each wing region than CpG oligonucleotides of the reference composition. In some embodiments, individual CpG oligonucleotides within the reference plurality differ from one another in stereochemical structure. In some embodiments, at least some CpG oligonucleotides within the reference plurality have a structure different from a structure represented by the plurality of CpG oligonucleotides of the composition. In some embodiments, at least some CpG oligonucleotides within the reference plurality do not comprise a wing region and a core region. In some embodiments, the reference composition is a substantially racemic preparation of CpG oligonucleotides that share the base sequence. In some embodiments, the reference composition is a chirally controlled CpG oligonucleotide composition of another CpG oligonucleotide type. In some embodiments, CpG oligonucleotides of the reference composition comprise more phosphorothioate linkages. In some embodiments, CpG oligonucleotides of the reference composition comprise only phosphorothioate linkages. In some embodiments, CpG oligonucleotides of the reference composition comprise fewer modified sugar moieties. In some embodiments, CpG oligonucleotides of the reference composition comprise fewer modified sugar moieties, wherein the modification is 2′-OR¹. In some embodiments, CpG oligonucleotides of the reference composition comprise more modified sugar moieties. In some embodiments, CpG oligonucleotides of the reference composition comprise more modified sugar moieties, the modification is 2′-OR¹. In some embodiments, CpG oligonucleotides of the reference composition comprise fewer phosphorothioate linkages. In some embodiments, CpG oligonucleotides of the reference composition have a wing, and comprise fewer phosphorothioate linkages at the wing. In some embodiments, CpG oligonucleotides of the reference composition comprise fewer Sp phosphorothioate linkages. In some embodiments, CpG oligonucleotides of the reference composition have a wing, and comprise fewer Sp phosphorothioate linkages at the wing. In some embodiments, CpG oligonucleotides of the reference composition comprise more Rp phosphorothioate linkages. In some embodiments, CpG oligonucleotides of the reference composition have a wing, and comprise more Rp phosphorothioate linkages at the wing. In some embodiments, CpG oligonucleotides of the reference composition comprise fewer methylated bases. In some embodiments, CpG oligonucleotides of the reference composition comprise more 2′-MOE modifications. In some embodiments, CpG oligonucleotides of the reference composition comprise fewer natural phosphate linkages. In some embodiments, CpG oligonucleotides of the reference composition comprise fewer natural phosphate linkages at the 5′- and/or 3′-end. In some embodiments, CpG oligonucleotides of the reference composition comprise fewer natural phosphate linkages in a region corresponding to a wing of CpG oligonucleotides of the first plurality. In some embodiments, CpG oligonucleotides of a provided composition comprise natural phosphate linkages in a wing, and CpG oligonucleotides of the reference composition comprise fewer natural phosphate linkages at the corresponding wing region. In some embodiments, CpG oligonucleotides of a provided composition comprises natural phosphate linkages in a wing, and CpG oligonucleotides of the reference composition comprises modified internucleotidic linkages at one or more such natural phosphate linkage locations in a wing. In some embodiments, CpG oligonucleotides of a provided composition comprise natural phosphate linkages in a wing, and CpG oligonucleotides of the reference composition comprises phosphorothioate linkages at one or more such natural phosphate linkage locations in a wing. In some embodiments, CpG oligonucleotides of the reference composition comprise no natural phosphate linkages. In some embodiments, CpG oligonucleotides of the reference composition comprise no wing-core-wing structure. In some embodiments, CpG oligonucleotides of a provided composition comprise a 5′-end wing region comprising a natural phosphate linkage between the two nucleosides at its 3′-end, and CpG oligonucleotides of a reference plurality do not have a natural phosphate linkage at the same position. In some embodiments, CpG oligonucleotides of a provided composition comprise a 3′-end wing region comprising a natural phosphate linkage between the two nucleosides at its 5′-end, and CpG oligonucleotides of a reference plurality do not have a natural phosphate linkage at the same position.

[1470] In some embodiments, CpG oligonucleotides of a provided composition contain more 2′-F modifications than CpG oligonucleotides of a reference composition. In some embodiments, CpG oligonucleotides of a provided composition contain more 2′-F modifications in a wing region. In some embodiments, CpG oligonucleotides of a provided composition contain more 2′-F modifications in each wing region.

[1471] In some embodiments, provided chirally controlled CpG oligonucleotide compositions comprises CpG oligonucleotides of one CpG oligonucleotide type. In some embodiments, provided chirally controlled CpG oligonucleotide compositions comprises CpG oligonucleotides of only one CpG oligonucleotide type. In some embodiments, provided chirally controlled CpG oligonucleotide compositions has CpG oligonucleotides of only one CpG oligonucleotide type. In some embodiments, provided chirally controlled CpG oligonucleotide compositions comprises CpG oligonucleotides of two or more CpG oligonucleotide types. In some embodiments, using such compositions, provided methods can target more than one target. In some embodiments, a chirally controlled CpG oligonucleotide composition comprising two or more CpG oligonucleotide types targets two or more targets. In some embodiments, a chirally controlled CpG oligonucleotide composition comprising two or more CpG oligonucleotide types targets two or more mismatches. In some embodiments, a single CpG oligonucleotide type targets two or more targets, e.g., mutations. In some embodiments, a target region of CpG oligonucleotides of one CpG oligonucleotide type comprises two or more “target sites” such as two mutations or SNPs.

[1472] In some embodiments, CpG oligonucleotides in a provided chirally controlled CpG oligonucleotide composition optionally comprise modified bases or sugars. In some embodiments, a provided chirally controlled CpG oligonucleotide composition does not have any modified bases or sugars. In some embodiments, a provided chirally controlled CpG oligonucleotide composition does not have any modified bases. In some embodiments, CpG oligonucleotides in a provided chirally controlled CpG oligonucleotide composition comprise modified bases and sugars. In some embodiments, CpG oligonucleotides in a provided chirally controlled CpG oligonucleotide composition comprise a modified base. In some embodiments, CpG oligonucleotides in a provided chirally controlled CpG oligonucleotide composition comprise a modified sugar. Modified bases and sugars for CpG oligonucleotides are widely known in the art, including but not limited in those described in the present disclosure. In some embodiments, a modified base is 5-mC. In some embodiments, a modified sugar is a 2′-modified sugar. Suitable 2′-modification of CpG oligonucleotide sugars are widely known by a person having ordinary skill in the art. In some embodiments, 2′-modifications include but are not limited to 2′-OR¹, wherein R¹ is not hydrogen. In some embodiments, a 2′-modification is 2′-OR¹, wherein R¹ is optionally substituted C₁₋₆ aliphatic. In some embodiments, a 2′-modification is 2′-MOE. In some embodiments, a modification is 2′-halogen. In some embodiments, a modification is 2′-F. In some embodiments, modified bases or sugars can further enhance activity, stability and/or selectivity of a chirally controlled CpG oligonucleotide composition, whose common pattern of backbone chiral centers provides unexpected activity, stability and/or selectivity.

[1473] In some embodiments, a provided chirally controlled CpG oligonucleotide composition does not have any modified sugars. In some embodiments, a provided chirally controlled CpG oligonucleotide composition does not have any 2′-modified sugars. In some embodiments, the present disclosure surprising found that by using chirally controlled CpG oligonucleotide compositions, modified sugars are not needed for stability, activity, and/or control of cleavage patterns. Furthermore, in some embodiments, the present disclosure surprisingly found that chirally controlled CpG oligonucleotide compositions of CpG oligonucleotides without modified sugars deliver better properties in terms of stability, activity, turn-over and/or control of cleavage patterns. For example, in some embodiments, it is surprising found that chirally controlled CpG oligonucleotide compositions of CpG oligonucleotides having no modified sugars dissociates much faster from cleavage products and provide significantly increased turn-over than compositions of CpG oligonucleotides with modified sugars.

[1474] As discussed in detail herein, the present disclosure provides, among other things, a chirally controlled CpG oligonucleotide composition, meaning that the composition contains a plurality of CpG oligonucleotides of at least one type. Each oligonucleotide molecule of a particular “type” is comprised of preselected (e.g., predetermined) structural elements with respect to: (1) base sequence; (2) pattern of backbone linkages; (3) pattern of backbone chiral centers; and (4) pattern of backbone P-modification moieties. In some embodiments, provided oligonucloetide compositions contain CpG oligonucleotides that are prepared in a single synthesis process. In some embodiments, provided compositions contain oligonucloetides having more than one chiral configuration within a single CpG oligonucleotide molecule (e.g., where different residues along the CpG oligonucleotide have different stereochemistry); in some such embodiments, such CpG oligonucleotides can be obtained in a single synthesis process, without the need for secondary conjugation steps to generate individual CpG oligonucleotide molecules with more than one chiral configuration.

[1475] Oligonucleotide compositions as provided herein can be used as agents for modulating a number of cellular processes and machineries, including but not limited to, transcription, translation, immune responses, epigenetics, etc. In addition, CpG oligonucleotide compositions as provided herein can be used as reagents for research and/or diagnostic purposes. One of ordinary skill in the art will readily recognize that the present disclosure disclosure herein is not limited to particular use but is applicable to any situations where the use of synthetic oligonucleitides is desirable. Among other things, provided compositions are useful in a variety of therapeutic, diagnostic, agricultural, and/or research applications.

[1476] In some embodiments, provided oligonucloetide compositions comprise CpG oligonucleotides and/or residues thereof that include one or more structural modifications as described in detail herein. In some embodiments, provided CpG oligonucleotide compositions comprise oligonucleoties that contain one or more nucleic acid analogs. In some embodiments, provided CpG oligonucleotide compositions comprise CpG oligonucleotides that contain one or more artificial nucleic acids or residues, including but not limited to: peptide nucleic acids (PNA), Morpholino and locked nucleic acids (LNA), glycon nucleic acids (GNA), threose nucleic acids (TNA), Xeno nucleic acids (ZNA), and any combination thereof.

[1477] In any of the embodiments, the disclosure is useful for CpG oligonucleotide-based modulation of gene expression, immune response, etc. Accordingly, stereo-defined, CpG oligonucleotide compositions of the disclosure, which contain CpG oligonucleotides of predetermined type (i.e., which are chirally controlled, and optionally chirally pure), can be used in lieu of conventional stereo-random or chirally impure counterparts. In some embodiments, provided compositions show enhanced intended effects and/or reduced unwanted side effects. Certain embodiments of biological and clinical/therapeutic applications of the disclosure are discussed explicitly below.

[1478] A provided CpG oligonucleotide composition as used herein can comprise single stranded and/or multiply stranded CpG oligonucleotides. In some embodiments, single-stranded CpG oligonucleotides contain self-complementary portions that can hybridize under relevant conditions so that, as used, even single-stranded CpG oligonucleotides can have at least partially double-stranded character. In some embodiments, a CpG oligonucleotide included in a provided composition is single-stranded, double-stranded, or triple-stranded. In some embodiments, a CpG oligonucleotide included in a provided composition comprises a single-stranded portion and a multiple-stranded portion within the CpG oligonucleotide. In some embodiments, as noted above, individual single-stranded CpG oligonucleotides can have double-stranded regions and single-stranded regions.

[1479] In some embodiments, provided compositions include one or more CpG oligonucleotides fully or partially complementary to strand of: structural genes, genes control and/or termination regions, and/or self-replicating systems such as viral or plasmid DNA. In some embodiments, provided compositions include one or more CpG oligonucleotides that are or act as siRNAs or other RNA interference reagents (RNAi agents or iRNA agents), shRNA, antisense CpG oligonucleotides, self-cleaving RNAs, ribozymes, fragment thereof and/or variants thereof (such as Peptidyl transferase 23S rRNA, RNase P, Group I and Group II introns, GIR1 branching ribozymes, Leadzyme, Hairpin ribozymes, Hammerhead ribozymes, HDV ribozymes, Mammalian CPEB3 ribozyme, VS ribozymes, glmS ribozymes, CoTC ribozyme, etc.), microRNAs, microRNA mimics, supermirs, aptamers, antimirs, antagomirs, Ul adaptors, triplex-forming CpG oligonucleotides, RNA activators, long non-coding RNAs, short non-coding RNAs (e.g., piRNAs), immunomodulatory CpG oligonucleotides (such as immunostimulatory CpG oligonucleotides, immunoinhibitory CpG oligonucleotides), GNA, LNA, ENA, PNA, TNA, morpholinos, G-quadruplex (RNA and DNA), antiviral CpG oligonucleotides, and decoy CpG oligonucleotides.

[1480] In some embodiments, provided compositions include one or more hybrid (e.g., chimeric) CpG oligonucleotides. In the context of the present disclosure, the term “hybrid” broadly refers to mixed structural components of oligonucloetides. Hybrid oliogonucleotides can refer to, for example, (1) a CpG oligonucleotide molecule having mixed classes of nucleotides, e.g., part DNA and part RNA within the single molecule (e.g., DNA-RNA); (2) complementary pairs of nucleic acids of different classes, such that DNA:RNA base pairing occurs either intramolecularly or intermolecularly; or both; (3) a CpG oligonucleotide with two or more kinds of the backbone or internucleotide linkages.

[1481] In some embodiments, provided compositions include one or more CpG oligonucleotide that comprises more than one classes of nucleic acid residues within a single molecule. For example, in any of the embodiments described herein, a CpG oligonucleotide can comprise a DNA portion and an RNA portion. In some embodiments, a CpG oligonucleotide can comprise a unmodified portion and modified portion.

[1482] Provided CpG oligonucleotide compositions can include CpG oligonucleotides containing any of a variety of modifications, for example as described herein. In some embodiments, particular modifications are selected, for example, in light of intended use. In some embodiments, it is desirable to modify one or both strands of a double-stranded CpG oligonucleotide (or a double-stranded portion of a single-stranded oligonucleotie). In some embodiments, the two strands (or portions) include different modifications. In some embodiments, the two strands include the same modificatinons. One of skill in the art will appreciate that the degree and type of modifications enabled by methods of the present disclosure allow for numerous permutations of modifications to be made. Example such modifications are described herein and are not meant to be limiting.

[1483] The phrase “antisense strand”, as used herein, in reference to a CpG oligonucleotide, refers to a CpG oligonucleotide that is substantially or 100% complementary to a target sequence of interest. The phrase “antisense strand” includes the antisense region of both CpG oligonucleotides that are formed from two separate strands, as well as unimolecular CpG oligonucleotides that are capable of forming hairpin or dumbbell type structures. The terms “antisense strand” and “guide strand” are used interchangeably herein. The phrase “sense strand”, as used herein, in reference to a CpG oligonucleotide, refers to a CpG oligonucleotide that has the same nucleoside sequence, in whole or in part, as a target sequence such as a messenger RNA or a sequence of DNA. The terms “sense strand” and “passenger strand” are used interchangeably herein.

[1484] By “target sequence” is meant any nucleic acid sequence whose expression or activity is to be modulated. The target nucleic acid can be DNA or RNA, such as endogenous DNA or RNA, viral DNA or viral RNA, or other RNA encoded by a gene, virus, bacteria, fungus, mammal, or plant. In some embodiments, a target sequence is associated with a disease or disorder.

[1485] By “specifically hybridizable” and “complementary” is meant that a nucleic acid can form hydrogen bond(s) with another nucleic acid sequence by either traditional Watson-Crick or other non-traditional types. In reference to the nucleic molecules of the present disclosure, the binding free energy for a nucleic acid molecule with its complementary sequence is sufficient to allow the relevant function of the nucleic acid to proceed, e.g., RNAi activity. Determination of binding free energies for nucleic acid molecules is well known in the art (see, e.g., Turner et al, 1987, CSH Symp. Quant. Biol. LIT pp. 123-133; Frier et al., 1986, Proc. Nat. Acad. Sci. USA83:9373-9377; Turner et al., 1987, Am. Chem. Soc. 109:3783-3785). A percent complementarity indicates the percentage of contiguous residues in a nucleic acid molecule that can form hydrogen bonds (e.g., Watson-Crick base pairing) with a second nucleic acid sequence (e.g., 5, 6, 7, 8, 9,10 out of 10 being 50%, 60%, 70%, 80%, 90%, and 100% complementary). “Perfectly complementary” or 100% complementarity means that all the contiguous residues of a nucleic acid sequence will hydrogen bond with the same number of contiguous residues in a second nucleic acid sequence. Less than perfect complementarity refers to the situation in which some, but not all, nucleoside units of two strands can hydrogen bond with each other. “Substantial complementarity” refers to polynucleotide strands exhibiting 90% or greater complementarity, excluding regions of the polynucleotide strands, such as overhangs, that are selected so as to be noncomplementary. Specific binding requires a sufficient degree of complementarity to avoid non-specific binding of the oligomeric compound to non-target sequences under conditions in which specific binding is desired, e.g., under physiological conditions in the case of in vivo assays or therapeutic treatment, or in the case of in vitro assays, under conditions in which the assays are performed. In some embodiments, non-target sequences differ from corresponding target sequences by at least 5 nucleotides.

### Biologically Active Agent: a CpG Oligonucleotide

[1486] In some embodiments, the present disclosure pertains to compositions and methods related to a CpG oligonucleotide composition.

[1487] In some embodiments, a CpG oligonucleotide is selected from: an antisense oligonucleotide, an RNAi agent, a miRNA, splice switching oligonucleotide (SSO), immunomodulatory nucleic acid, an aptamer, a ribozyme, a Piwi-interacting RNA (piRNA), a small nucleolar RNA (snoRNA), a mRNA, a lncRNA, a ncRNA, an antigomir (e.g., an antagonist to a miRNA, lncRNA, ncRNA or other nucleic acid), a plasmid, a vector, or a portion thereof.

[1488] In some embodiments, the present disclosure pertains to: a CpG oligonucleotide composition comprising a plurality of CpG oligonucleotides, which share: 1) a common base sequence; 2) a common pattern of backbone linkages; and 3) a common pattern of backbone phosphorus modifications. In some embodiments, the present disclosure pertains to: a chirally controlled CpG oligonucleotide composition comprising a plurality of CpG oligonucleotides, which share: 1) a common base sequence; 2) a common pattern of backbone linkages; and 3) a common pattern of backbone phosphorus modifications; wherein: the composition is chirally controlled in that the plurality of CpG oligonucleotides share the same stereochemistry at one or more chiral internucleotidic linkages; and one or more CpG oligonucleotides of the plurality are optionally and individually conjugated to a targeting compound or moiety. In some embodiments, a CpG oligonucleotide is a splice-switching oligonucleotide. In some embodiments, a CpG oligonucleotide is capable of skipping or mediating skipping of an exon in a gene related to a muscle-related disease or disorder. In some embodiments, a CpG oligonucleotide is capable of skipping or mediating skipping of an exon in the dystrophin gene. In some embodiments, the sequence of the CpG oligonucleotide comprises or consists of the sequence of any splice-switching oligonucleotide disclosed herein.

[1489] In some embodiments, the plurality of CpG oligonucleotides share the same stereochemistry at five or more chiral internucleotidic linkages. In some embodiments, the plurality of CpG oligonucleotides share the same stereochemistry at ten or more chiral internucleotidic linkages. In some embodiments, the plurality of CpG oligonucleotides share the same stereochemistry at each of the chiral internucleotidic linkages so that they share a common pattern of backbone chiral centers. In some embodiments, CpG oligonucleotides of the plurality share the same chemical modification patterns. In some embodiments, CpG oligonucleotides of the plurality share the same chemical modification patterns comprising one or more base modifications. In some embodiments, CpG oligonucleotides of the plurality share the same chemical modification patterns comprising one or more sugar modifications. In some embodiments, the sequence of the CpG oligonucleotide(s) comprises or consists of the sequence of any splice-switching oligonucleotide disclosed herein.

[1490] In some embodiments, the plurality of CpG oligonucleotides share a common pattern of sugar modification, which comprises 3 or more 2′-F. In some embodiments, the plurality of CpG oligonucleotides share a common pattern of sugar modification, which comprises 3 or more consecutive 2′-F. In some embodiments, the plurality of CpG oligonucleotides share a common pattern of sugar modification, which comprises 3 or more consecutive 2′-F within the 10 nucleotide at the 5′-end. In some embodiments, the plurality of CpG oligonucleotides share a common pattern of sugar modification, which comprises 3 or more 2′-F within the 10 nucleotide at the 5′-end. In some embodiments, the plurality of CpG oligonucleotides share a common pattern of sugar modification, which comprises 3 or more consecutive 2′-F at the 5′-end. In some embodiments, the plurality of CpG oligonucleotides share a common pattern of sugar modification, which comprises 5 or more consecutive 2′-F within the first 10 nucleotide at the 3′-end. In some embodiments, the plurality of CpG oligonucleotides share a common pattern of sugar modification, which comprises 5 or more 2′-F within the 10 nucleotide at the 3′-end. In some embodiments, the plurality of CpG oligonucleotides share a common pattern of sugar modification, which comprises 7 or more consecutive 2′-F at the 3′-end. In some embodiments, the plurality of CpG oligonucleotides share a common pattern of sugar modification, which comprises 3 or more consecutive 2′-F at the 5′-end, 3 or more consecutive 2′-F at the 3′-end, and 3 or more 2′-OR between the 5′-end 2′-F and the 3′-end 2′-F modifications. In some embodiments, the plurality of CpG oligonucleotides share a common pattern of sugar modification, which comprises 3 or more 2′-F at the 5′-end, 3 or more 2′-F at the 3′-end, and 3 or more 2′-OR between the 5′-end 2′-F and the 3′-end 2′-F modifications. In some embodiments, the plurality of CpG oligonucleotides share a common pattern of sugar modification, which comprises 5 or more 2′-F within the 10 nucleotides at the 5′-end. In some embodiments, the plurality of CpG oligonucleotides share a common pattern of sugar modification, which comprises 3 or more consecutive 2′-F at the 5′-end. In some embodiments, the plurality of CpG oligonucleotides share a common pattern of sugar modification, which comprises 7 or more 2′-F within the 10 nucleotides at the 3′-end. In some embodiments, the plurality of CpG oligonucleotides share a common pattern of sugar modification, which comprises 5 or more consecutive 2′-F within the 10 nucleotides at the 3′-end. In some embodiments, the plurality of CpG oligonucleotides share a common pattern of sugar modification, which comprises 7 or more consecutive 2′-F at the 3′-end. In some embodiments, the plurality of CpG oligonucleotides comprises a 5′-wing-core-wing-3′ structure, wherein each wing region independently comprises 3 to 10 nucleosides, and the core region independently comprises 3 to 10 nucleosides. In some embodiments, the sequence of the CpG oligonucleotide(s) comprises or consists of the sequence of any CpG oligonucleotide disclosed herein.

[1491] In some embodiments, the present disclosure pertains to: a method of delivering a CpG oligonucleotide to a muscle cell or tissue in a human subject, comprising: (a) providing a composition of any one of the preceding embodiments; and (b) Administering the composition to the human subject such that the CpG oligonucleotide is delivered to a muscle cell or tissue in the subject. In some embodiments, the sequence of the CpG oligonucleotide(s) comprises or consists of the sequence of any CpG oligonucleotide disclosed herein.

[1492] In some embodiments, the common base sequence is capable of hybridizing with a transcript in a muscle cell, which transcript contains a mutation that is linked to a muscle disease, or whose level, activity and/or distribution is linked to a muscle disease. In some embodiments, the common base sequence is capable of hybridizing with a transcript in a muscle cell, and the composition is characterized in that when it is contacted with the transcript in a transcript splicing system, splicing of the transcript is altered relative to that observed under reference conditions selected from the group consisting of absence of the composition, presence of a reference composition, and combinations thereof. In some embodiments, the common base sequence is capable of hybridizing with a transcript in a cell. In some embodiments, a common base sequence hybridizes with a transcript of dystrophin, Huntingtin, myostatin, a myostatin receptor, ActRIIA, ActRIIB, DMPK, SMN2, dystrophia myotonica protein kinase (DMPK), Proprotein convertase subtilisin/kexin type 9 (PCSK9), SMAD7, transthyretin (TTR), alpha-1 antitrypsin (AAT), aminolevulinate synthase 1 (ALAS1), antithrombin 3 (ATIII), factor VII (FVII), factor XI (FXI), factor XII (FXII), hepcidin antimicrobial peptide (HAMP), a gene of hepatitis B (HBV), hepatitis C (HCV) or hepatitis D (HDV), programmed death-ligand 1 (PD-L1), complement component 5 (C5), transmembrane protease, serine 6 (TMPRSS6), or KRT14 (Keratin 14). In some embodiments, the common base sequence hybridizes with a transcript of dystrophin. In some embodiments, the common base sequence hybridizes with a transcript of dystrophin, and the composition increases the production of one or more functional or partially functional proteins encoded by dystrophin. In some embodiments, the sequence of the CpG oligonucleotide(s) comprises or consists of the sequence of any CpG oligonucleotide disclosed herein.

[1493] In some embodiments, the CpG oligonucleotide or CpG oligonucleotides is or are splice switching oligonucleotide or CpG oligonucleotides. In some embodiments, the sequence of the CpG oligonucleotide(s) comprises or consists of the sequence of any CpG oligonucleotide disclosed herein.

[1494] In various embodiments, a composition comprises a nucleic acid comprising a CpG region motif [as non-limiting examples: a CpG oligonucleotide, an antisense oligonucleotide, an RNAi agent, a miRNA, immunomodulatory nucleic acid, an aptamer, a Piwi-interacting RNA (piRNA), a small nucleolar RNA (snoRNA), a ribozyme, a mRNA, a lncRNA, a ncRNA, an antigomir (e.g., an antagonist to a miRNA, lncRNA, ncRNA or other nucleic acid), a plasmid, or a vector, or a portion thereof] which targets any gene listed herein.

[1495] In some embodiments, a composition comprises a nucleic acid comprising a CpG region motif which targets any of: AFF2, APOB, APOC3, AR, ATM, ATN1, ATXN1, ATXN10, ATXN2, ATXN3, ATXN7, ATXN80S, BACE1, BBS1, BCL2L1, BRCA1, BRCA2, C9orf72, CACNA1A, CD40, CD40, CDKN1A, CFTR, CLC1, CNBP, COL7A1, CYP11A, DMD, DMPK, DYSF, Dystrophin, ERBB2, F7, F9, FANCC, FGB, FGFR1, FKTN, FLT1, FMR1, FXN, GHR, GRP143, HBB, HNRNPH1, HTT (Huntingtin), IKBKAP, IL5RA, ISCU, JPH3, KDR, LMNA, MAPT, MCL1, MDM2, MLC1, MST1R, MSTN, MUT, MYC, NF1, NPC1, PCCA, PCCB, PHB, PKM, PMM2, PPP2R2B, PTCH1, PTS, PTS, RHO, RHO, RPGR, RPGR, SMN2, SRA1, STAT3, TBP, TERT, TMPRSS2, TNFRSFlB, USH1C, USP5, AAT, ALAS1, ATIII, C5, DMPK, FVII, FXI, FXII, HAMP, a gene of HBV, HCV, or HDV, Keratin 14, PCSK9, PD-L1, TMPRSS6, TTR, and WT1. In some embodiments, the common base sequence is capable of hybridizing with a transcript in a cell. In some embodiments, a common base sequence hybridizes with a transcript of any gene described herein or known in the art.

[1496] In some embodiments, a composition comprises a nucleic acid comprising a CpG region motif suitable for treatment of any of: Afibrinogenemia, Alzheimer's disease, Alzheimer's disease/FTDP-17 Taupathies, Ataxia telangiectasia, Autoimmune disease, Bardet-Biedl syndrome, Beta-thalassemia, Cancer, CDG1A, Congenital adrenal insufficiency, Crohn's Disease, Cystic fibrosis, Dementia, Dentatorubral-pallidoluysian atrophy, Duchenne muscular dystrophy, Dystrophic epidermolysis bullosa, Epidermolysis Bullosa Simplex, Factor VII deficiency, Familial dysautonomia, Fanconi anemia, FHBL/atherosclerosis, Fragile X mental retardation, Fragile X syndrome, Friedreich's ataxia, Frontotemporal dementia, Fukuyama congenital muscular dystrophy (FCMD), Growth hormone insensitivity, Hemophilia A, HPABH4A, Huntington's Diease, Huntington's Disease-like 2, Hutchinson-Gilford progeria (HGPS), Immune-response, Infection, Inflammatory disease, Influenza virus, Irritable Bowel Syndrome, Machado-Joseph disease, Mental retardation, Mental retardation, X-linked, associated with FRAXE, Methylmalonic aciduria, Miyoshi myopathy, MLC1, Muscle wasting diseases, Muscular Dystrophy, Myopathy with lactic acidosis, Myotonic muscular dystrophy, Myotonic dystrophy type 1, Neurofibromatosis, Niemann-Pick type C, Ocular albinism type 1, Oculpopharyngeal muscular dystrophy, Propionic acidemia, Retinitis pigmentosa, Spinal muscular atrophy, Spinocerebellar ataxia, Spinocerebellar ataxia type 1, Spinomuscular bulbar atrophy, or Usher syndrome.

[1497] In some embodiments, an antisense oligonucleotide is a CpG oligonucleotide which participates in RNaseH-mediated cleavage; for example, an antisense oligonucleotide hybridizes in a sequence-specific manner to a portion of a target mRNA, thus targeting the mRNA for cleavage my RNaseH. In some embodiments, an antisense oligonucleotide is able to differentiate between a wild-type and a mutant allele of a target. In some embodiments, an antisense oligonucleotide significantly participates in RNaseH-mediated cleavage of a mutant allele but participates in RNaseH-mediated cleavage of a wild-type allele to a much less degree (e.g., does not significantly participate in RNaseH-mediated cleavage of the wild-type allele of the target). Various CpG oligonucleotides and CpG region motifs are listed herein.

[1498] In some embodiments, the present disclosure pertains to a composition comprising a nucleic acid (including, but not limited to, a CpG oligonucleotide) and a lipid comprising a C₁₀-C₈₀ linear, saturated or partially unsaturated, aliphatic chain. In some embodiments, the present disclosure pertains to a composition comprising a nucleic acid (including, but not limited to, a CpG oligonucleotide) and a lipid comprising a C₁₀-C₈₀ linear, saturated or partially unsaturated, aliphatic chain, optionally substituted with one or more C₁₋₄ aliphatic group. In some embodiments, the present disclosure pertains to a composition comprising a nucleic acid (including, but not limited to, a CpG oligonucleotide) agent and a lipid comprising a C₁₀-C₆₀ linear, saturated or partially unsaturated, aliphatic chain. In some embodiments, the present disclosure pertains to a composition comprising a nucleic acid (including, but not limited to, a CpG oligonucleotide) and a lipid comprising a C₁₀-C₆₀ linear, saturated or partially unsaturated, aliphatic chain, optionally substituted with one or more C₁₋₄ aliphatic group. In some embodiments, the present disclosure pertains to a composition comprising a nucleic acid (including, but not limited to, a CpG oligonucleotide) and a lipid comprising a C₁₀-C₄₀ linear, saturated or partially unsaturated, aliphatic chain. In some embodiments, the present disclosure pertains to a composition comprising a nucleic acid (including, but not limited to, a CpG oligonucleotide) and a lipid comprising a C₁₀-C₄₀ linear, saturated or partially unsaturated, aliphatic chain, optionally substituted with one or more C₁₋₄ aliphatic group.

[1499] In some embodiments, provided oligonucleotides are optionally conjugated with another agent. In some embodiments, provided oligonucleotides are conjugated with lipids. In some embodiments, provided oligonucleotides are conjugated with biotin. Various technologies can be utilized for conjugation of oligonucleotides with another agent, in some embodiments, optionally through a linker.

### Certain Example CpG Oligonucleotides and Interactions of CpG Oligonucleotides with TLR9

[1500] Certain structural characteristics and classes of CpG oligonucleotides, and the interactions of CpG oligonucleotides, are described below.

[1501] The present disclosure, among other things, details the novel and surprising finding that the chirality of the phosphorothioates or other internucleotidic linkages in the CpG region motifs can greatly alter activity of the CpG oligonucleotides. A chirally controlled CpG oligonucleotide composition comprising a CpG oligonucleotide which has a novel CpG region motif described herein [and defined at least in part by the chirality of the phosphorothioates] and is useful in modulating an immune response. Depending on the CpG region motif, different CpG oligonucleotides were found to be either agonistic or antagonistic to the immune response. A chirally controlled CpG oligonucleotide composition comprising an agonistic CpG oligonucleotide can thus be used as an immunostimulatory agent, e.g., vaccine, adjuvant or monotherapy. Antagonistic CpG oligonucleotides can be used to antagonize the immune response. If no alteration of the immune response is desired, one can design a therapeutic oligonucleotide which avoids CpG region motifs which are agonistic or antagonistic.

[1502] Certain characteristics and classes of CpG oligonucleotides, and the interactions of CpG oligonucleotides with TLR9 (based on reports using stereorandom CpG oligonucleotide compositions) are described below, followed by additional detailed description of the novel CpG region motifs and methods of making and using chirally controlled CpG oligonucleotide compositions comprising them. In some embodiments, an active or efficacious CpG oligonucleotide is one which exhibits significantly altered immunomodulatory activity (either agonism or antagonism) compared to a negative control (e.g., in the absence of the oligonucleotide) and/or a reference.

### Structural Characteristics of Example CpG Oligonucleotides

[1503] Many reported structural characteristics of CpG oligonucleotides that can elicit a desired immune response can be utilized in provided oligonucleotides in accordance with the present disclosure.

### Length of CpG Oligonucleotides

[1504] Various lengths can be utilized in accordance with the present disclosure, for example, the following:

[1505] Several reportedly active CpG oligonucleotides comprise strands of 46 nt. Pohar et al. 2015 J. Immunol. 194: 3901-3908 and Supplemental Figures.

[1506] Pohar et al. also reported an efficacious 40-mer CpG oligonucleotide. Pohar et al. 2015 J. Immunol. 194: 3901-3908.

[1507] Several active CpG oligonucleotides reportedly are 38 nt long. Pohar et al. 2015 J. Immunol. 194: 3901-3908 and Supplemental Figures.

[1508] A 34-mer variant of ODN2006 (a 24-mer) reportedly still retained over 90% of the potency of ODN2006 to activate human TLR9. Pohar et al. 2015 J. Immunol. 194: 3901-3908.

[1509] Several efficacious CpG oligonucleotides reportedly are 32-nt long. WO 2015/108047.

[1510] Several active CpG oligonucleotides reportedly are 30 nt long. Pohar et al. 2015 J. Immunol. 194: 3901-3908 and Supplemental Figures.

[1511] ODN2006 is a reportedly efficacious 24-mer CpG oligonucleotide. Pohar et al. 2015 J. Immunol. 194: 3901-3908. Class C CpG oligonucleotide 2395 reportedly is 22 nt long. Lahoud et al. 2012 Proc. Natl. Acad. Sci. USA 109: 16270-16275.

[1512] High activity CpG oligonucleotides have been designed which reportedly are 21 nt in length. Pohar et al. 2015 J. Immunol. 194: 3901-3908.

[1513] Class B CpG oligos 1668 and 1826 reportedly are both 20 nt long. Lahoud et al. 2012 Proc. Natl. Acad. Sci. USA 109: 16270-16275.

[1514] A 16-mer shortened variant of ODN2006 (a 24-mer) reportedly still retains significant potency to activate human TLR9. Pohar et al. 2015 J. Immunol. 194: 3901-3908.

[1515] An active CpG oligonucleotide reportedly is 16 nt long. Verthelyi et al. 2001 J. Immunol. 166: 2372-2377.

[1516] Several active CpG oligonucleotides reportedly are 15 nt long. Krieg et al. 1995 Nature 374:546-549.

[1517] An active CpG oligonucleotide reportedly is 14 nt long. PCT/JP2013/069107.

[1518] Several immunostimulatory CpG oligonucleotides reportedly are 12 nt long. Verthelyi et al. 2002 J. Immunol. 168: 1659-1663.

[1519] An oligonucleotide as short as 8 nt reportedly stimulated IgM production in a study by Krieg et al. 1995 Nature 374: 546-549.

[1520] Several reportedly active CpG oligonucleotides are 8 nt long. Krieg et al. 2003 Oligo. 13: 491-499.

[1521] Thus, a variety of lengths have been reported for active CpG oligonucleotides.

[1522] Base Sequence of CpG region motif

[1523] Various base sequences, including around the CpG motif (the CpG region motif), can be utilized in accordance with the present disclosure, for example the following:

[1524] Several researchers have attempted to define the base sequence parameters for the CpG region motif (also referenced as “Core CpG motif” in the literature). In the sequences listed below, the CpG is indicated as “C”.

[1525] The sequence of RRCGYY, where R is a purine (Pu) and Y is a pyrimidine (Py) [Krieg et al. 1995 Nature 374: 546-549], and GACGTT [Yi et al. 1998 J. Immunol. 160: 5898-5906] have been reported as immunostimulatory in mice.

[1526] In contrast, the sequence GTCTT reportedly was proposed as immunostimulatory in the human. Hartmann et al. 2000 J. Immun. 164: 944-953.

[1527] The base sequences Pu Py CG Py Py and NNNQCGWNNN (SEQ ID NO: 1518), where Q=T, G or A, W=A or T, and N=any nucleotide, have been reported for Type K CpG oligonucleotides.

[1528] The base sequence RYCGRY, where R=A or G and Y=C or T reportedly has been reported for Type D CpG oligonucleotides.

[1529] The base sequence TCTCG at the 5′ end of the oligonucleotide reportedly has been reported for Class C CpG oligonucleotides.

[1530] ODN2006 reportedly has a T immediately 5′ to each of its four CpG motifs (thus, TCG); changing any T to A reduce immunostimulation, though significant activity was retained. Pohar et al. 2015 J. Immunol. 194: 3901-3908.

[1531] Thus, a variety of potentially immunogenic base sequences have been reported for the CpG region.

### Number of CpG Motifs

[1532] Active CpG oligonucleotides have been reported which have any of a variety of numbers of CpG motifs.

[1533] Several reported CpG oligonucleotides include the following:

[1534] Several reportedly active CpG oligonucleotides reportedly have only 1 CpG motif. Krieg et al. 1995 Nature 374:546-549.

[1535] Several active variants of ODN2006 reportedly have only 1 CpG motif. Pohar et al. 2015 J. Immunol. 194: 3901-3908 and Supplemental Figures.

[1536] Several active CpG oligonucleotides reportedly have 1 CpG motif. Krieg et al. 2003 Oligo. 13: 491-499.

[1537] An efficacious CpG oligonucleotide reportedly has only 1 CpG motif, 21 nt from the 3′ end. Pohar et al. 2015 J. Immunol. 194: 3901-3908 and Supplemental Figures.

[1538] Several active CpG oligonucleotides reportedly have only 1 CpG motif. Verthelyi et al. 2001 J. Immunol. 166: 2372-2377.

[1539] SMAD7 series CpG oligonucleotide reportedly has 2 CpG motifs. Monteleone et al. 2015 NEJM 372: 12.

[1540] Several immunostimulatory CpG oligonucleotides reportedly have 2 CpG motifs. Verthelyi et al. 2002 J. Immunol. 168: 1659-1663.

[1541] SOD1 series CpG oligonucleotide reportedly has 3 CpG motifs. Miller et al. 2013 Lancet Neurol. 12: 435.

[1542] ODN2006 reportedly has 4 CpG motifs. Pohar et al. 2015 J. Immunol. 194: 3901-3908.

[1543] Additional variants of ODN2006 have 2, 3, 6 or 8 CpG motifs reportedly showed significant immunostimulation. Pohar et al. 2015 J. Immunol. 194: 3901-3908.

[1544] Efficacious CpG oligonucleotides have thus been reported with a variety of numbers of CpG motifs.

[1545] In some embodiments, provided oligonucleotides comprise one or more CpG. In some embodiments, provided oligonucleotides comprise two or more CpG. In some embodiments, provided oligonucleotides comprise three or more CpG. In some embodiments, provided oligonucleotides comprise four or more CpG. In some embodiments, provided oligonucleotides comprise five or more CpG.

### Location of CpG Motifs

[1546] CpG motifs can be present at or near the 5′ or 3′ end of an oligonucleotide, and/or in the middle of the oligonucleotide. Certain examples are described herein. 5′ end:

[1547] The distance between the furthest upstream (most 5′) CpG and the 5′ end can vary from oligonucleotide to oligonucleotide. Active CpG oligonucleotides can have any of a variety of distances between the most upstream CpG motif and the 5′ end. Certain examples are described herein.

[1548] Several reported CpG oligonucleotides include the following:

[1549] The ODN2006 CpG oligonucleotide reportedly comprises a CpG at a position 1 nt (T) away from the 5′ end. Vollmer et al. 2004 Eur. J. Immunol. 34: 251-262.

[1550] A SOD1 CpG oligonucleotide reportedly comprises a CpG 1 nt (C) from the 5′ end. Miller et al. 2013 Lancet Neurol. 12: 435.

[1551] Class C CpG oligonucleotide 2395 has a CpG 1 nt (T) from the 5′ end. Lahoud et al. 2012 Proc. Natl. Acad. Sci. USA 109: 16270-16275.

[1552] A SMAD7 CpG oligonucleotide reportedly comprises a CpG 2 nt (GT) from the 5′ end. Monteleone et al. 2015 NEJM 372: 12.

[1553] Several CpG oligonucleotides reportedly comprise a CpG 4 nt from the 5′ end. WO 2015/108047.

[1554] Class A CpG oligonucleotide 2216 reportedly has an upstream CpG 6 nt (GGGGGA) from the 5′ end. Lahoud et al. 2012 Proc. Natl. Acad. Sci. USA 109: 16270-16275.

[1555] Class B CpG oligos 1668 and 1826 reportedly both have a CpG 7 nt from the 5′ end (in both cases, TCCATGA). Lahoud et al. 2012 Proc. Natl. Acad. Sci. USA 109: 16270-16275.

[1556] Efficacious CpG oligonucleotides have thus been reported with the furthest upstream CpG at a variety of distances from the 5′ end.

### Middle:

[1557] The location of CpG motifs, including those in the middle, and the distance between CpG motifs can vary from oligonucleotide to oligonucleotide. Active CpG oligonucleotides have been reported which have any of a variety of locations of CpG motifs and distances between them. Certain examples are described herein.

[1558] Several reported CpG oligonucleotides include the following:

[1559] Pohar et al. has reportedly shown that from 1 to 6 CpG motifs can be located in the middle of a CpG oligonucleotide, and the distances between them can be varied.

[1560] Pohar et al. show several CpG oligonucleotides reportedly comprising CpG motifs which are only 1 nt apart. Pohar et al. 2015 J. Immunol. 194: 3901-3908.

[1561] Several CpG oligonucleotides reportedly comprise 4, 6 or 7 nt between various CpG motifs. WO 2015/108047.

[1562] An efficacious CpG oligonucleotide reportedly comprising 4 CpG motifs comprised sequences of 11 nt between the second and third, and 11 nt between the third and fourth CpG motifs; both 11-nt sequences were TTTTTTTTTGT (SEQ ID NO: 1519). Pohar et al. 2015 J. Immunol. 194: 3901-3908.

[1563] Several active CpG oligonucleotides reportedly comprised 2 CpG motifs 12 nt apart. Pohar et al. 2015 J. Immunol. 194: 3901-3908.

[1564] An active CpG oligonucleotide reportedly comprised 2 CpG motifs 16 nt apart. Pohar et al. 2015 J. Immunol. 194: 3901-3908.

[1565] An active CpG oligonucleotide reportedly comprised 2 CpG motifs 20 nt apart. Pohar et al. 2015 J. Immunol. 194: 3901-3908.

[1566] An active CpG oligonucleotide reportedly comprised 2 CpG motifs 24 nt apart. Pohar et al. 2015 J. Immunol. 194: 3901-3908.

[1567] Efficacious CpG oligonucleotides have thus been reported with a variety of distances between the middle CpG motifs, and between the middle CpG motifs and the most upstream or downstream CpG motifs.

### 3′ End:

[1568] The distance between the most downstream CpG and the 3′ end can vary from oligonucleotide to oligonucleotide. Active CpG oligonucleotides can have any of a variety of distances between the most downstream CpG motif and the 3′ end. Certain examples are described herein.

[1569] Several reported CpG oligonucleotides include the following:

[1570] Class C CpG oligonucleotide 2395 reportedly has a CpG at the 3′ end. Lahoud et al. 2012 Proc. Natl. Acad. Sci. USA 109: 16270-16275.

[1571] An active CpG oligonucleotide reportedly has a CpG motif 1 nt from the 3′ end. Pohar et al. 2015 J. Immunol. 194: 3901-3908 and Supplement Figures.

[1572] A SOD1 CpG oligonucleotide reportedly has a CpG motif 2 nt (CA) from the 3′ end. Miller et al. 2013 Lancet Neurol. 12: 435.

[1573] Class B CpG oligonucleotide 1826 reportedly has a downstream CpG 2 nt from the 3′ end (TT). Lahoud et al. 2012 Proc. Natl. Acad. Sci. USA 109: 16270-16275.

[1574] ODN2006 reportedly has a CpG motif 2 nt (TT) from the 3′ end. Vollmer et al. 2004 Eur. J. Immunol. 34: 251-262.

[1575] Several efficacious CpG oligonucleotides reportedly have a CpG 3 nt (GGG) from the 3′ end. WO 2015/108047.

[1576] A SMAD CpG oligonucleotide reportedly has a CpG motif 4 nt (CAGC) from the 3′ end. Monteleone et al. 2015 NEJM 372: 12.

[1577] Class A CpG oligonucleotide 2216 reportedly has a downstream CpG 5 nt from the 3′ end (GGGGG). Lahoud et al. 2012 Proc. Natl. Acad. Sci. USA 109: 16270-16275.

[1578] A reportedly active CpG oligonucleotide has a CpG motif 7 nt from the 3′ end. Pohar et al. 2015 J. Immunol. 194: 3901-3908 and Supplement Figures.

[1579] Several reportedly efficacious CpG oligonucleotides have a CpG 9 nt (GGG) from the 3′ end. WO 2015/108047.

[1580] Deletion of the CpG motif at the 3′ end of ODN2006 reportedly left 3 remaining CpG motifs; the furthest downstream CpG was 10 nt (TTTTTTTTTT) (SEQ ID NO: 1520) from the 3′ end. This CpG oligonucleotide remained highly active. Pohar et al. 2015 J. Immunol. 194: 3901-3908.

[1581] Class B CpG oligonucleotide 1668 reportedly has a sole CpG 11 nt from the 3′ end (TTCCTGATGCT) (SEQ ID NO: 1521). Lahoud et al. 2012 Proc. Natl. Acad. Sci. USA 109: 16270-16275.

[1582] Another variant of ODN2006, reportedly comprising only two CpG motifs was also active; the further downstream CpG was 13 nt (TTTTTTTTTTTTT) (SEQ ID NO: 1522) from the 3′ end. Pohar et al. 2015 J. Immunol. 194: 3901-3908.

[1583] Another efficacious CpG oligonucleotide reportedly comprised a CpG motif 15 nt from the 3′ end. Pohar et al. 2015 J. Immunol. 194: 3901-3908 and Supplemental Figures.

[1584] Another efficacious CpG oligonucleotide reportedly comprised a CpG motif 16 nt from the 3′ end. Pohar et al. 2015 J. Immunol. 194: 3901-3908 and Supplemental Figures.

[1585] Another efficacious CpG oligonucleotide reportedly comprised a CpG motif 17 nt from the 3′ end. Pohar et al. 2015 J. Immunol. 194: 3901-3908 and Supplemental Figures.

[1586] Another efficacious CpG oligonucleotide reportedly comprised a CpG motif 19 nt from the 3′ end. Pohar et al. 2015 J. Immunol. 194: 3901-3908 and Supplemental Figures.

[1587] Another CpG oligonucleotide reportedly showing substantial activity comprises a CpG motif 21 nt (all T) from the 3′ end. Pohar et al. 2015 J. Immunol. 194: 3901-3908.

[1588] Another efficacious CpG oligonucleotide reportedly had only 1 CpG motif, 21 nt from the 3′ end. Pohar et al. 2015 J. Immunol. 194: 3901-3908 and Supplemental Figures.

[1589] Another CpG oligonucleotide reportedly showing substantial activity comprises a CpG 27 nt (all T) from the 3′ end. Pohar et al. 2015 J. Immunol. 194: 3901-3908.

[1590] Efficacious CpG oligonucleotides have thus been reported with a variety of distances between the furthest downstream CpG and the 3′ end.

[1591] Several types of CpG oligonucleotides have been reported in the literature and can be utilized in accordance with the present disclosure. In some embodiments, these have been divided into various classes and types:

| | Reported structural details | | |
|---|---|---|---|
| Class or Type | and sequence motifs | Reported biology | References |
| Type K (also | One to five CpG motifs, | Stimulate humoral response | Mutwiri et al. 2004 J. |
| known as | typically in a PS backbone. | Stimulate proliferation of peripheral blood mononuclear | Control. Rel. 97: 1-17; |
| Class B or B | Sequence motif: | cells and increase expression of IL-6 and IL-12 | Verthelyi et al. 2001 J. |
| type) | Pu Py C p G Py Py | Stimulate B cell proliferation and antibody production, | Immunol. 166: 2372- |
| | or | e.g., IgM and IgG. | 2377; Hartmann et al. |
| | NNNQ-CpG-WNNN (SEQ | Trigger pDC to differentiate and produce TNF-alpha | 2003 Eur. J. Immun. |
| | ID NO: 1523) | | 33: 1633-1641; WO |
| | Q = T, G or A | | 98/18810A1; U.S. Pat. |
| | W = A or T | | No. 8,470,342. |
| | N = any nucleotide | | |
| Type C (also | Like Type K, are composed | Stimulates B cells to secrete IL-6 | Marshall et al. 2003 J. |
| known as | entirely of PS nucleotides, | Stimulates plasmacytoid dendritic cells (pDC) to | Leukoc. Biol. 73: 781- |
| Class C) | but resemble D-type in | produce IFN-alpha | 92; Vollmer et al. 2004 |
| | containing palindromic CpG | Induce IP-10 production and strong NK activation | Eur. J. Immun. 34: |
| | motifs that form a stem-loop. | | 251-262; |
| | TCGTCG motif at 5′ end, | | U.S. Pat. No. |
| | linked by a T spacer to GC- | | 8,470,342. |
| | rich palindromic sequence. | | |
| Type D (also | Phosphodiester core flanked | Stimulate cellular response | Verthelyi et al. 2001 J. |
| known as | by PS terminal nucleotides. | Trigger pDC to mature and secrete IFN-alpha but have | Immunol. 166: 2372- |
| Class A or A | A single CpG motif flanked | no effect on B cells | 2377; Krug et al. 2001 |
| type) | by palindromic sequences | | Eur. J. Immun. 31: |
| | that enables formation of a | | 3026-3037; Uhlmann |
| | stem-loop. | | et al. 2003 Curr. Opin. |
| | PolyG motifs at 3′ and 5′ ends | | Drug Discov. Dev. 6: |
| | that facilitate formation of | | 204-217; Ballas 1996 |
| | concatemers, intermolecular | | J. Immun. 157: 1840- |
| | tetrads, and high molecular | | 1845; Krug et al. 2001 |
| | weight aggregates. | | Eur. J. Immunol. 31: |
| | Sequence motif: | | 2154-2163; Marshall et |
| | RY-CpG-RY | | al. 2003 J. Leukoc. |
| | R = A or G | | Biol. 73: 781-792; |
| | Y = C or T | | Vollmer et al. Eur. J. |
| | | | Immunol. 34: 251-262; |
| | | | U.S. Pat. No. |
| | | | 8,470,342. |
| Type P (for | Contain double palindromes | Strong Type I IFN production | Vollmer et al. 2009 |
| “Palindromic”) | that can form hairpins at their | | Adv. Drug Del. Rev. |
| | GC-rich 3′- ends as well as | | 61: 195-204; |
| | concatamerize due to the | | Samulowit et al. 2010 |
| | presence of 5′ palindromes | | Oligo. 20: 93-101 |

[1592] Many developed CpG oligonucleotides belong to class B and activate B cells and other immune cells to release IL-6, IL-10, IL-12 and MIP-lb. Rutz et al. 2004 Eur. J. Immunol. 34: 2541-2550; and Vollmer et al. 2004 Eur. J. Immunol. 34: 251-262.

[1593] It is noted, however, that there is some variability and inconsistency in the reporting of the characteristics of various CpG oligonucleotides and classes thereof; without being wishing to be bound by any particular theory, the present disclosure suggests that this can be due to variations in experimental compositions and methods used by different researchers. It is also noted that, as described herein, there is variability between efficacious CpG oligonucleotides in the mouse and human, and equivalent studies have not been performed in both mouse and human in all cases.

### TLR9

[1594] TLR9 is Toll-Like Receptor 9, also known as CD289; RefSeq (mRNA) NM_017442; RefSeq (protein) NP_059138.

[1595] TLR9 is reported to recognize and to be activated by CpG motifs in bacterial DNA. Hemmi et al. 2000 Nature 408: 740-745; Takeshita et al. 2004 J. Immun. 173: 2552-2561. The crystal structures of three forms of TLR9 have been reported: unliganded, bound to agonistic CpG-DNA, and bound to inhibitory DNA. Ohto et al. 2015 Nature 520: 702-705. A single CpG oligonucleotide reportedly acts as a molecular glue bridging two TLR9 molecules.

[1596] TLR9 is reported to be a member of a group of genes known as Toll Like Receptors (TLRs). As reported by Shirota et al. 2015, Vaccines 3: 390-407, TLRs are an important component of the mammalian host's pathogen sensing mechanism. Janeway et al. 2002 Ann. Rev. Immun. 20: 197-216; Akira et al. 2004 Nat. Rev. Immun. 4: 499-511. TLRs are reportedly typically divided into two families, based on their subcellular localization: TLRs 1, 2 and 4-6 are reportedly expressed on the cell surface and sense bacterial cell wall components, whereas TLRs 3 and 7-9 are reportedly expressed in endosomes and sense viral or bacterial nucleic acids. Kawasaki et al. 2014 Front. Immun. Doi:10.2289/fimmu.2014.00461. The molecular structures recognized by TLRs have been reportedly evolutionarily conserved, are expressed by a variety of infectious microorganisms, and are termed pathogen-associated molecular patterns (PAMPs). For example, TLR4 reportedly recognizes bacterial lipopolysaccharides. Janeway et al. 2002 Ann. Rev. Immun. 20: 197-216; Akira et al. 2004 Nat. Rev. Immun. 4: 499-511.

[1597] Gene knockdown and gain of function experiments reported TLR9 as the receptor conferring CpG reactivity by directly engaging bacterial DNA or synthetic CpG oligos in a CpG motif-dependent manner. Hemmi et al. 2000 Nature 408: 740-745; Rutz et al. 2004 Eur. J. Immunol. 34: 2541-2550; Bauer et al. 2001 Proc. Natl. Acad. Sci. USA 98: 9237-9242; Latz et al. 2004 Nat. Immunol. 5: 190-198; Cornelie et al. 2004 J. Biol. Chem. 279: 15124-15129. Human immune cells reported to constituitively express TLR9 are reported to include plasmacytoid dendritic cells (pDC) and B cells. Iwasaki et al. 2004 Nat. Immunol. 5: 987-995. TLR9 expression has also been reported on some nonimmune cells, including pulmonary epithelial cells and lung cancers, keratinocytes, and intestinal epithelium. Droemann et al. 2005 Respir. Res. 6: 1; Platz et al. 2004 J. Immunol. 173: 1219-1223; Lebre et al. 2007 J. Invest. Dermatol. 127: 331-341; Pedersen et al. 2005 Clin. Exp. Immunol. 141: 298-306; Zannetti et al. 2014 J. Immunol. 193: 3398-3408.

[1598] Binding of CpG oligos to TLR9 dimers reportedly results in allosteric conformational changes in the TLR9 cytoplasmic signaling domains, resulting in the recruitment of signal adaptor molecules. TLR9 reportedly associates with MyD88 to initiate CpG-mediated effects via signal transducing proteins such as member of the IL-1 receptor-associated kinase (IRAK) family, mitogen activated kinases (MAPK) or IFN regulatory factors. These events are reported to lead to the activation of nuclear factor-kB (NFkB) transcription factors, cytokine production or expression of co-stimulatory molecules in human B cells and pDCs. Lebre et al. 2007 J. Invest. Dermatol. 127: 331-341; Latz 2007 Nat. Immunol. 8: 772-779; Barton et al. 2003 Science 300: 1524-1525; Uematsu et al. 2005 J. Exp. Med. 201: 915-923; Xu et al. 2003 J. Biol. Chem. 278: 36334-36340; Tsujimura et al. 2004 J. Immunol. 172: 6820-6827; Yang et al. 2005 Immunity 23: 465-478; Tailor et al. 2006 Cell Res. 16: 134-140; Krieg et al. 2002 Ann. Rev. Immunol. 20: 709-760; Schetter et al. 2004 Curr. Opin. Drug Discov. Dev. 7: 204-210.

[1599] The innate immune response elicited by TLR activation is characterized by the production of pro-inflammatory cytokines, chemokines, type 1 interferons and anti-microbial peptides. This innate response promotes and modulates the adaptive immune system.

[1600] As shown above, various characteristics of many CpG oligonucleotides have been reported, along with different classes of CpG oligonucleotides, and the interactions of CpG oligonucleotides with TLR9.

[1601] Previously published reports generally used stereorandom CpG oligonucleotides (rather than the present disclosure, which shows data involving stereocontrolled CpG oligonucleotide compositions). Only very few studies have attempted to address the role of stereochemistry in CpG oligonucleotides. One study reported a comparison of Rp- or Sp-enriched CpG-containing oligonucleotides [Yu et al. 2000 Bioorg. Med. Chem. 8:275-284]; however, this study used Rp- or Sp-enriched rather than stereopure oligonucleotides. In contrast to Yu et al., the present disclosure presents, among other things, data from high purity stereocontrolled CpG oligonucleotide compositions. In contrast to Yu et al., CpG oligonucleotides described herein is prepared with 98:2 to >99:1 diastereoselectivity at each chiral internucleotidic linkage. Yu et al. and another study examining chirality [Krieg et al. 2003 Oligonucleotides 13: 491-499] also used only mouse cells and not human cells for TLR9-related studies. The present disclosure shows that stereocontrolled CpG oligonucleotides can demonstrate very different effects in mouse and human cells. In addition, in contrast to the present disclosure, various previous studies did not utilize chirally controlled CpG oligonucleotides wherein the CpG region motif comprised at least one phosphorothioate or other internucleotidic linkage in the Rp conformation and at least one phosphorothioate or other internucleotidic linkage in the Sp conformation.

[1602] Some but not all the characteristics of stereorandom CpG oligonucleotides are shared with stereocontrolled CpG oligonucleotide compositions, as detailed herein. Some stereorandom CpG oligonucleotides demonstrate very different immunomodulatory activities than stereocontrolled CpG oligonucleotide compositions of the same base sequence. The present disclosure shows the novel finding that the chirality of the phosphorothioate in a CpG region motif greatly alters the immunogenicity of a CpG oligonucleotide.

[1603] The present disclosure thus presents novel CpG region motifs, defined by sequences of chirality of each phosphorothioate (the phosphorothioate being in either the Rp or Sp conformation), and, in some cases, also by the sequences of bases immediately 5′ and/or 3′ to the CpG dinucleotide.

### Chirality

[1604] In many synthetic CpG oligonucleotides, the phosphodiester in the sugar-phosphate backbone has been replaced by a modified internucleotidic linkage such as a phosphorothioate (PS). In some embodiments, PS increases stability against nucleases. A PS comprises a chiral center at the phosphorus atom which can exist in either of two configurations: Rp or Sp.

[1605] The present disclosure demonstrates, among other things, that the chirality (Rp or Sp) of the phosphorothioates and in and around the CpG (in the CpG region motif) are important for activity.

[chemical structure]

[1606] In the present disclosure, we provide novel data related to the effects of the chirality of the phosphorothioates in and around the CpG motif, leading to new insights into the structural requirements thereof. The present disclosure also shows that the effects of chirality differ in mouse and human. Thus, data generated from mouse studies is not necessarily predictive of the effects in human.

[1607] The present disclosure demonstrates in both mouse models and human PBMCs that a stereorandom oligonucleotide and a corresponding chirally controlled oligonucleotide composition can display very different activities against TLR9. The present disclosure demonstrates that for mouse TLR9, some stereopure CpG-oligos with all-Sp backbone are strong agonists, whose activities are further modulated by the chirality of the PS bonds in and adjacent to the CpG motifs (CpG regions). Human TLR9 (hTLR9) activities are affected very differently, in several cases, with agonists preferring Sp chirality on the 3′ of CpG motif. Furthermore, the present disclosure demonstrates that, in many oligonucleotides shown herein, 2′-modifications on the ribose ring completely eliminate agonist activity on mouse TLR9, but not on human TLR9, which is more relevant to drug discovery for human diseases. Mouse and human TLR9 respond differently to stereopure CpG oligonucleotide compositions with 2′-modifications and CpG methylations. These data surprisingly define phosphorothioate chirality as an important determinant of TLR9 activity.

[1608] The present disclosure presents various CpG region motifs which can be used to design CpG oligonucleotides which capable of eliciting a desired immune response.

[1609] A CpG region motif is a particular motif, comprising the CpG dinucleotide, plus one or more of the positions flanking (immediately 5′ and/or 3′ of) the CpG, which positions are defined by the base sequence, the chemistry of the phosphate or internucleoside linker (e.g., a phosphorothioate), and/or the chirality of the internucleoside linker (e.g., if the phosphorothioate at a particular position is in the Rp or Sp configuration).

[1610] While the present disclosure showed that, in at least some chirally controlled CpG oligonucleotide compositions, some CpG region motifs had greater immunomodulatory activity (e.g., greater agonistic or greater antagonistic activity) than others, the present disclosure encompasses any chirally controlled CpG oligonucleotide composition, wherein the CpG region motif comprises a stereodefined phosphorothioate or internucleotidic linkage, wherein the CpG oligonucleotide demonstrates a greater agonistic or antagonistic activity than a negative control (e.g., in the absence of the oligonucleotide composition). The present disclosure thus encompasses a chirally controlled CpG oligonucleotide comprising any CpG region motif disclosed herein.

[1611] Example CpG region motifs include, as non-limiting examples, listed below in Table 1, each presented in 5′ to 3′ direction:

TABLE 1
EXAMPLE CpG REGION MOTIFS

₁. N₁-p-N₂-p-C-p-G-p-N₃-p-N₄ p
₂. N₁-(*)-N₂-(*)-C-(*)-G-(*)-N₃-(*)-N₄-(*)
₃. N₁-(*S)-N₂-(*S)-C-(*S)-G-(*S)-N₃-(*S)-N₄-(*S)
₄. N₁-(*R)-N₂-(*R)-C-(*R)-G-(*R)-N₃-(*R)-N₄-(*R)
5. N₁-(*R/S)-N₂-(*R/S)-C-(*R)-G-(*S)-N₃-(*R/S)-N₄-(*R/S)
6. N₁-(*R)-N₂-(*S)-C-(*R)-G-(*S)-N₃-(*S)-N₄-(*S)
7. N₁-(*S)-N₂-(*R)-C-(*R)-G-(*S)-N₃-(*S)-N₄-(*S)
8. N₁-(*S)-N₂-(*S)-C-(*R)-G-(*S)-N₃-(*R)-N₄-(*S)
9. N₁-(*S)-N₂-(*S)-C-(*R)-G-(*S)-N₃-(*S)-N₄-(*R)
10. N₁-(*R)-N₂-(*S)-C-(*R)-G-(*S)-N₃-(*S)-N₄-(*R)
11. N₁-(*R)-N₂-(*S)-C-(*R)-G-(*S)-N₃-(*R)-N₄-(*S)
12. N₁-(*R)-N₂-(*R)-C-(*R)-G-(*S)-N₃-(*S)-N₄-(*S)
13. N₁-(*S)-N₂-(*S)-C-(*R)-G-(*S)-N₃-(*R)-N₄-(*R)
14. N₁-(*S)-N₂-(*R)-C-(*R)-G-(*S)-N₃-(*R)-N₄-(*S)
15. N₁-(*R)-N₂-(*R)-C-(*R)-G-(*S)-N₃-(*R)-N₄-(*S)
16. N₁-(*R)-N₂-(*R)-C-(*R)-G-(*S)-N₃-(*S)-N₄-(*R)
17. N₁-(*R)-N₂-(*S)-C-(*R)-G-(*S)-N₃-(*R)-N₄-(*R)
18. N₁-(*S)-N₂-(*R)-C-(*R)-G-(*S)-N₃-(*S)-N₄-(*S)
19. Pu-(*R/S)-Py-(*R/S)-C-(*R)-G-(*S)-Py-(*R/S)-Py/Pu-(*R/S)
20. Py/Pu-(*R/S)-Py-(*R/S)-C-(*R)-G-(*S)-Py-(*R/S)-Py/Pu-(*R/S)
21. Py-(*R/S)-Py-(*R/S)-C-(*R)-G-(*S)-Py-(*R/S)-Pu-(*R/S)
22. Pu-(*R/S)-Py-(*R/S)-C-(*R)-G-(*S)-Py-(*R/S)-Py/Pu-(*R/S)
23. Py-(*R/S)-Pu-(*R/S)-C-(*R)-G-(*S)-Pu-(*R/S)-Py-(*R/S)
24. N₁-(*R)-N₂-(*R)-m5C-(*R)-G-(*R)-N₃-(*R)-N₄-(*R)
25. Pu-(*R)-Py-(*R)-m5C-(*R)-G-(*R)-Py-(*R)-Py/Pu-(*R)
26. N₁-(*R/S)-N₂-(*R/S)-m5C-(*R)-G-(*S)-N₃-(*R/S)-N₄-(*R/S)
27. N₁-(*R/S)-N₂-(*R/S)-C-(*R)-G-(*S)-N₃-(*R/S)-N₄-(*R/S), wherein the C and G are
both 2′H (DNA)
28. N₁-(*R/S)-N₂-(*R/S)-m5C-(*R)-G-(*S)-N₃-(*R/S)-N₄-(*R/S)
29. N₁-(*R)-N₂-(*R)-C-(*R)-G-(*R)-N₃-(*R)-N₄-(*R)
30. N₁-(*R)-Py-(*R)-C-(*R)-G-(*R)-Py-(*R)-N₂-(*S)
31. N₁-(*S)-Py-(*R)-C-(*R)-G-(*R)-Py-(*S)-N₂-(*S)
32. Pu-(*S)-Py-(*S)-C-(*R)-G-(*S)-Py-(*S)-N₂-(*S), wherein C and G are 2′-MOE or
2′-OMe, and C is methylated or unmethylated
33. N₁-(*S)-N₂-(*S)-m5C-(*R)-G-(*S)-N₃-(*S)-N₄-(*S)
34. N₁-(*R/S)-C-(*R/S)-G-(*S)-N₂
35. N₁-(*S)-C-(*S)-G-(*S)-N₂-(*S)
36. N₁-(*S)-C-(*S)-G-(*S)-N₂-(*S), wherein the C and G are both 2′H (DNA)
37. N₁-(*S)-C-(*S)-G-(*S)-N₂-(*S), wherein each nucleoside is 2′H (DNA)
38. N₁-(*S)-C-(*S)-G-(*S)-N₂-(*S), wherein each nucleoside is 2′-modified
39. N₁-(*S)-C-(*S)-G-(*S)-N₂-(*S), wherein each nucleoside is 2′-MOE
40. T-(*S)-C-(*S)-G-(*S)-T-(*S)-N₁
41. T-(*S)-C-(*S)-G-(*S)-T-(*S)-N₁, wherein C and G are both 2′H (DNA)
42. T-(*S)-C-(*S)-G-(*S)-T-(*S)-N₁, wherein each nucleoside is 2′H (DNA)
43. N₁-(*S)-C-(*R)-G-(*S)-N₂-(*S)
44. N₁-(*S)-C-(*R)-G-(*S)-N₂-(*S), wherein the C and G are both 2′H (DNA)
45. N₁-(*S)-C-(*R)-G-(*S)-N₂-(*S), wherein each nucleoside is 2′H (DNA)
46. Py-(*S)-C-(*R)-G-(*S)-Py-(*S)
47. Py-(*S)-C-(*R)-G-(*S)-Py-(*S), wherein the C and G are both 2′H (DNA)
48. Py-(*S)-C-(*R)-G-(*S)-Py-(*S), wherein each nucleoside is 2′H (DNA)
49. T-(*S)-C-(*R)-G-(*S)-T-(*S)
50. T-(*S)-C-(*R)-G-(*S)-T-(*S), wherein the C and G are both 2′H (DNA)
51. T-(*S)-C-(*R)-G-(*S)-T-(*S), wherein each nucleoside is 2′H (DNA)
52. N₁-(*R)-C-(*R)-G-(*S)-N-(*S)
53. N₁-(*R)-C-(*R)-G-(*S)-N-(*S), wherein the C and G are both 2′H (DNA)
54. N₁-(*R)-C-(*R)-G-(*S)-N-(*S), wherein each nucleoside is 2′H (DNA)
55. N₁-(*R)-C-(*R)-G-(*S)-N-(*R)
56. N₁-(*R)-C-(*R)-G-(*S)-N-(*R), wherein the C and G are both 2′H (DNA)
57. N₁-(*R)-C-(*R)-G-(*S)-N-(*R), wherein each nucleoside is 2′H (DNA)
58. N₁-(*R)-C-(*R)-G-(*R)-N₂
59. Py-(*R)-C-(*R)-G-(*R)-Py
60. N₁-(*R/S)-C-(*S)-G-(*S)-N₂
61. N₁-(*R/S)-C-(*S)-G-(*S)-N₂, wherein the C and G are both 2′H (DNA)
62. N₁-(*R/S)-C-(*S)-G-(*S)-N₂, wherein each nucleoside is 2′H (DNA)
63. N₁-(*R)-C-(*R)-G-(*R)-N₂-(*R)-N₃, wherein each nucleoside is 2′-modified and C is
methylated or unmethylated
64. N₁-(*R)-C-(*R)-G-(*R)-N₂-(*R)-N₃, wherein each nucleoside is 2′-MOE and C is
methylated or unmethylated
65. N₁-(*R)-m5C-(*R)-G-(*R)-N₂-(*R)-N₃, wherein each nucleoside is 2′-modified
66. N₁-(*R)-m5C-(*R)-G-(*R)-N₂-(*R)-N₃, wherein each nucleoside is 2′-MOE, 2′-F or
2′-OMe
67. N₁-(*R)-m5C-(*R)-G-(*R)-N₂-(*R)-N₃, wherein each nucleoside is 2′-MOE
68. N₁-(*R/S)-C-(*R)-G-(*R/S)-N₂, wherein the two *R/S are not both R or both S
69. N₁-(*R/S)-C-(*S)-G-(*R/S)-N₂, wherein the two *R/S are not both R or both S
70. N₁-(*R/S)-C-(*R/S)-G-(*R/S)-N₂
71. N₁-(*R/S)-C-(*R/S)-G-(*R/S)-N₂, wherein at least one *R/S is *R and at least one *R/S
is *S
72. N₁-(*R/S)-C-(*R/S)-G-(*R/S)-N₂, wherein at least one *R/S is *R and at least one *R/S
is *S, and wherein C is unmethylated
73. N₁-(*R/S)-C-(*R/S)-G-(*R)-N₂
74. N₁-(*R/S)-C-(*R/S)-G-(*S)-N₂
75. N₁-(*R)-C-(*R)-G-(*S)-N₂
76. N₁-(*R)-C-(*S)-G-(*S)-N₂
77. N₁-(*R)-C-(*S)-G-(*R)-N₂
78. N₁-(*S)-C-(*R)-G-(*S)-N₂
79. N₁-(*S)-C-(*R)-G-(*R)-N₂
80. N₁-(*S)-C-(*S)-G-(*R)-N₂
81. Py-(*R/S)-C-(*R/S)-G-(*R/S)-N₁
82. Py-(*R/S)-C-(*R/S)-G-(*R/S)-N₁, wherein at least one *R/S is *R and at least one *R/S
is *S
83. Py-(*R/S)-C-(*R/S)-G-(*R/S)-N₁, wherein at least one *R/S is *R and at least one *R/S
is *S, and wherein C is unmethylated
84. Py-(*R)-C-(*R)-G-(*S)-N₁
85. Py-(*R)-C-(*S)-G-(*S)-N₁
86. Py-(*R)-C-(*S)-G-(*R)-N₁
87. Py-(*S)-C-(*R)-G-(*S)-N₁
88. Py-(*S)-C-(*R)-G-(*R)-N₁
89. Py-(*S)-C-(*S)-G-(*R)-N₁
90. N₁-(*R/S)-C-(*R/S)-G-(*R/S)-Py
91. N₁-(*R/S)-C-(*R/S)-G-(*R/S)-Py, wherein at least one *R/S is *R and at least one *R/S
is *S
92. N₁-(*R/S)-C-(*R/S)-G-(*R/S)-Py, wherein at least one *R/S is *R and at least one *R/S
is *S, and wherein C is unmethylated
93. N₁-(*R)-C-(*R)-G-(*S)-Py
94. N₁-(*R)-C-(*S)-G-(*S)-Py
95. N₁-(*R)-C-(*S)-G-(*R)-Py
96. N₁-(*S)-C-(*R)-G-(*S)-Py
97. N₁-(*S)-C-(*R)-G-(*R)-Py
98. N₁-(*S)-C-(*S)-G-(*R)-Py
99. Py-(*R/S)-C-(*R/S)-G-(*R/S)-Py
100.
Py-(*R/S)-C-(*R/S)-G-(*R/S)-Py, wherein at least one *R/S is *R and at least
one *R/S is *S
101.
Py-(*R/S)-C-(*R/S)-G-(*R/S)-Py, wherein at least one *R/S is *R and at least
one *R/S is *S, and wherein C is unmethylated
102. Py-(*R)-C-(*R)-G-(*S)-Py
103. Py-(*R)-C-(*S)-G-(*S)-Py
104. Py-(*R)-C-(*S)-G-(*R)-Py
105. Py-(*S)-C-(*R)-G-(*S)-Py
106. Py-(*S)-C-(*R)-G-(*R)-Py
107. Py-(*S)-C-(*S)-G-(*R)-Py
108. N₁-(*S)-C-(*R)-G
109. N₁-(*R)-C-(*R)-G
110. N₁-(*S)-C-(*S)-G
111. N₁-(*R)-C-(*S)-G
112. C-(*R/S)-G-(*R/S)
113. C-(*R)-G-(*R)
114. C-(*R)-G-(*S)
115. C-(*S)-G-(*R)
116. C-(*S)-G-(*S)
117. C-(*R/S)-G
118. C-(*R)-G
119. C-(*S)-G
120. N₁-(*R/S)-N₂-(*R/S)-C-(*R/S)-G-(*R/S)-N₃-(*R/S)-N₄
121. m5C-(*R)-m5C-(*R)-G-(*R)-N₁, where all the nucleosides are 2′-MOE.
122. m5C-(*R)-m5C-(*R)-G-(*R)-Py, where all the nucleosides are 2′-MOE.
123. m5C-(*R)-m5C-(*R)-G-(*R)-T, where all the nucleosides are 2′-MOE.
124. m5C-(*R)-m5C-(*S)-G-(*R)-T, where all the nucleosides are 2′-MOE.
125. N₁-(*R)-m5C-(*R)-G-(*R)-N₂, wherein N₁ is methylated or not methylated, and all
the nucleosides are 2′-MOE.
126. N₁-(*R)-m5C-(*R)-G-(*R)-Py, wherein N₁ is methylated or not methylated, and all
the nucleosides are 2′-MOE.
127. N₁-(*R/S)-m5C-(*R/S)-G-(*R/S)-N₂, wherein at least 2 of the *R/S are *R, all the
nucleosides are 2′-MOE, and N₁ and N₂ are methylated or not methylated.
128. N₁-(*R)-m5C-(*R/S)-G-(*R)-N₂, wherein at least 2 of the *R/S are *R, all the
nucleosides are 2′-MOE, and N₁ and N₂ are methylated or not methylated.
129. N₁-(*R)-[C]-(*R)-[G]-(*R)-N₂, where N₁ is 2′H, 2′-MOE or 2′-OMe; [C] is C, m5C,
2′-MOE C, or 2′-MOE m5C; [G] is optionally G, 2′-Ome G, or 2′-MOE G; and N₂ is 2′H,
2′-MOE or 2′-OMe.
130. N₁-(*S)-[C]-(*R)-[G]-(*S)-N₂, where N₁ is 2′H, 2′-MOE or 2′-OMe; [C] is C, m5C,
2′-MOE C, or 2′-MOE m5C; [G] is optionally G, 2′-Ome G, or 2′-MOE G; and N₂ is 2′H,
2′-MOE or 2′-OMe.
131. N₁-(*S)-[C]-(*R)-[G]-(*S)-N₂, where N₁ is 2′H; [C] is C, m5C, 2′-MOE C, or 2′-MOE
m5C; [G] is optionally G, 2′-Ome G, or 2′-MOE G; and N₂ is 2′H.
132. N₁-(*R)-[C]-(*R)-[G]-(*R)-Pyeo, where N₁ and Py are 2′H, 2′-MOE or 2′OMe; and
[C] is C or 2′-MOE C; and [G] is G or 2′-MOE G
133. N₁-(*R)-[C]-(*R)-[G]-(*R)-Neo, where N₁ and N₂ are 2′H, 2′-MOE or 2′OMe; and [C]
is 2′-MOE m5C
134. Py-(*R)-C-(*R)-G-(*R)-Py
135. Py-(*R)-C-(*R)-G-(*R)-Py
136. Py-(*S)-C-(*R)-G-(*S)-Py
137. Py-(*S)-C-(*S)-G-(*S)-Py
138. Py-(*R)-[C]-(*R)-[G]-(*R)-Py, where [C] is 2′-MOE C; and [G] is 2′-MOE G
139. Py-(*R)-[C]-(*R)-[G]-(*S)-Py, where [C] is 2′-MOE C; and [G] is 2′-MOE G
140. Py-(*R)-[C]-(*R)-G-(*R)-Py
141.Py-(*R)-[C]-(*R)-G-(*R)-Py
142. Py-(*R)-[C]-(*R)-[G]-(*R)-N₁, where [C] is 2′-OMe m5C, and [G] is 2′-OMe G, and
N₁ is 2′-OMe
143. Py-(*R)-[C]-(*R)-[G]-(*R)-Py, where [C] is 2′-OMe m5C, and [G] is 2′-OMe G
144. Py-(*R)-[C]-(*R)-[G]-(*R)-Py, where [C] is 2′-OMe C and [G] is 2′-OMe G
145. Py-(*S)-[C]-(*R)-[G]-(*S)-Py, where [C] is 2′-MOE C and [G] is 2′-MOE G
146. Py-(*S)-[C]-(*R)-G-(*S)-Py
147. Py-(*S)-[C]-(*R)-[G]-(*S)-Py, where [C] is 2′-MOE m5C and [G] is 2′-MOE G
148. Py-(*S)-[C]-(*R)-[G]-(*S)-Py, where [C] is 2′-OMe m5C and [G] is 2′-OMe G
149. Py-(*S)-[C]-(*R)-[G]-(*S)-Py, where [C] is 2′-OMe C and [G] is 2′-OMe G
150. Py-(*R)-[C]-(*R)-[G]-(*R)-Py, where both [C] and [G] are 2′-modified
151. N₁-(*R)-[C]-(*R)-[G]-(*R)-N₂, where both [C] and [G] are 2′-modified
152. N-(*X)-C-(*R/S)-G*R/SN
153. N-(*R/S)-C-(*X)-G*R/SN
154. N-(*R/S)-C-(*R/S)-G-(*X)-N
155. N-(*X)-C-(*R)-G-(*R)-N
156. N-(*X)-C-(*R)-G-(*S)-N
157. N-(*X)-C-(*S)-G-(*R)-N
158. N-(*X)-C-(*S)-G-(*S)-N
159. N-(*R)-C-(*X)-G-(*R)-N
160. N-(*R)-C-(*X)-G-(*S)-N
161. N-(*S)-C-(*X)-G-(*R)-N
162. N-(*S)-C-(*X)-G-(*S)-N
163. N-(*R)-C-(*R)-G-(*X)-N
164. N-(*R)-C-(*S)-G-(*X)-N
165. N-(*S)-C-(*S)-G-(*X)-N
166. N-(*S)-C-(*R)-G-(*X)-N
167. N-(*X)-C-(*R)--(*X)-N
168. N-(*X)-C-(*S)--(*X)-N
169. N-(*R)-C-(*X)--(*X)-N
170. N-(*S)-C-(*X)--(*X)-N
171. N-(*X)-C-(*X)-G-(*R)-N
172. N-(*X)-C-(*X)-G-(*S)-N
173. N-(*D)-C-(*R/S)-G-(*R/S)-N
174. N-(*R/S)-C-(*D)-G-(*R/S)-N
175. N-(*R/S)-C-(*R/S)-G-(*D)-N
176. N-(*D)-C-(*R)-G-(*R)-N
177. N-(*D)-C-(*R)-G-(*S)-N
178. N-(*D)-C-(*S)-G-(*R)-N
179. N-(*D)-C-(*S)-G-(*S)-N
180. N-(*R)-C-(*D)-G-(*R)-N
181. N-(*R)-C-(*D)-G-(*S)-N
182. N-(*S)-C-(*D)-G-(*R)-N
183. N-(*S)-C-(*D)-G-(*S)-N
184. N-(*R)-C-(*R)-G-(*D)-N
185. N-(*R)-C-(*S)-G-(*D)-N
186. N-(*S)-C-(*S)-G-(*D)-N
187. N-(*S)-C-(*R)-G-(*D)-N
188. N-(*D)-C-(*R)--(*D)-N
189. N-(*D)-C-(*S)--(*D)-N
190. N-(*R)-C-(*D)-G-(*D)-N
191. N-(*S)-C-(*D)-G-(*D)-N
192. N-(*D)-C-(*D)-G-(*R)-N
193. N-(*D)-C-(*D)-G-(*S)-N
In these various motifs, and as otherwise used herein:
N₁, N₂, N₃, N₄: a nucleobase which is A, G, C, T or U, or a modified variant thereof.
p: a phosphodiester linkage
*: a phosphorothioate which can be in the Rp or Sp configuration, in a stereomixture
*R: a phosphorothioate in the Rp configuration
*S: a phosphorothioate in the Sp configuration
*R/S: a phosphorothioate which is defined as Rp or Sp, in any one of several stereopure preparations

[1612] In the present disclosure, unless otherwise specified, the terms “*” and “*R/S” are distinguished. “*” is used in a stereomixture; “*R/S” and “*S/R” (which are equivalent) represent any of several defined stereopure preparations. For example, the motif (2) N₁-(*)—N₂-(*)—C-(*)-G-(*)—N₃-(*)-N₄-(*) represents a stereomixture of molecules; for example, a mixture comprising molecules with motifs (6) and (7) and (8) and (9), etc. In contrast, the motif (5) N₁-(*R/S)-N₂-(*R/S)-C-(*R)-G-(*S)-N₃-(*R/S)-N₄-(*R/S) represents any one of several defined molecules; for example, a preparation of molecules only of motif (6) or only (7) or only (8) or only (9), etc. Thus, motif (2) N₁-(*)—N₂-(*)—C-(*)-G-(*)—N₃-(*)-N₄-(*) is a mixture of, for example, molecules of motifs (3), (4), (6), (7), (8), (9), (10), (11), (12), (13), (14), (15), (16), (17) and (18). The motif (5) N₁-(*R/S)-N₂-(*R/S)-C-(*R)-G-(*S)-N₃-(*R/S)-N₄-(*R/S) represents molecules of motifs (3), (4), (6), (7), (8), (9), (10), (11), (12), (13), (14), (15), (16), (17) or (18). By “stereopure” in this context means that the majority (in various cases, at least 50%, at least 60%, at least 70%, at least 80%, at least 90% or at least 95%) of the CpG oligonucleotides all have the same CpG region motif. Thus, as another non-limiting example, a preparation wherein 80% of the CpG oligonucleotides are of the motif (14) is an example of a preparation of a CpG oligonucleotide of CpG region motif (5) N₁-(*R/S)-N₂-(*R/S)-C-(*R)-G-(*S)-N₃-(*R/S)-N₄-(*R/S). A non-limiting example of N₁-(*)—N₂-(*)—C-(*)-G-(*)—N₃-(*)-N₄-(*) is WV-1494 (FIGS. 12 and 13). Some non-limiting examples of CpG oligonucleotides of motif N₁-(*R/S)-N₂-(*R/S)-C-(*R)-G-(*S)-N₃-(*R/S)-N₄-(*R/S) include WV-1375 (FIGS. 2 and 3), WV-1374 (FIG. 3); WV-1696 (FIGS. 7 and 10), WV-1698 (FIG. 7), WV-1493 (FIGS. 10 and 11). In some embodiments of the present disclosure, the CpG oligonucleotide comprises a strand of 15 to 49 nucleotides, the strand comprising at least two copies of the CpG region motif of N₁-(*R/S)-N₂-(*R/S)-C-(*R)-G-(*S)-N₃-(*R/S)-N₄-(*R/S). In some embodiments of the present disclosure, the CpG oligonucleotide comprises a strand of 15 to 49 nucleotides, the strand comprising at least two copies of the CpG region motif of N₁-(*R/S)-N₂-(*R/S)-C-(*R)-G-(*S)-N₃-(*R/S)-N₄-(*R/S), wherein the C and G are both 2′H (DNA).

[1613] Another non-limiting example of a motif is N₁-(*R/S)-N₂-(*R/S)-C-(*R)-G-(*S)-N₃-(*R/S)-N₄-(*R/S), where C and G are both neither 2′-MOE or 2′-OMe.

[1614] Another non-limiting example of a motif is N₁-(*R/S)-N₂-(*R/S)-C-(*R)-G-(*S)-N₃-(*R/S)-N₄-(*R/S), where C and G are both DNA. The present disclosure thus encompasses a composition comprising an oligonucleotide comprising a strand comprising one of any motif described herein.

[1615] The present disclosure thus encompasses a composition comprising an oligonucleotide comprising a strand comprising two or more of any motif described herein. *R/S can also be represented as:

| | | |
|---|---|---|
| *R | or | *S |
| S | | R |

[1616] Pu: Purine (A or G, or a modified variant thereof)
[1617] Py: Pyrimidine (C, U or T, or a modified variant thereof)
[1618] Pu/Py or Py/Pu: A position which can be Pu or Py.
[1619] m5C: 5-methyl-Cytosine
[1620] *D or (*D): a phosphorodithioate, wherein both of the non-bridging phosphorus atoms in a phosphodiester have been replaced by sulfur.
[1621] *X or (*X): in a population of oligonucleotides or an oligonucleotide composition, some of the individual oligonucleotides have a phosphorothioate in the Rp conformation and some have a phosphorothioate in the Sp conformation at this position.
   It is also noted that in CpG region motifs, a space (“ ”) is equivalent to a hyphen (“-”).
   It is also noted that some motifs result in CpG oligonucleotides which are agonists (e.g., motifs 3 to 28) and some which are antagonists (e.g., motifs 29 to 33).

### Length of CpG Oligonucleotides

[1622] A CpG oligonucleotide or a chirally controlled CpG oligonucleotide composition which comprises a strand comprising any CpG region motif disclosed herein can be of any sequence, either a minimum or a maximum, which allows the CpG oligonucleotide to either agonize an immune response, antagonize an immune response, or neither, as desired.

[1623] In some embodiments, a CpG oligonucleotide or a chirally controlled CpG oligonucleotide composition which comprises a strand comprising a CpG region motif disclosed herein can be no more than 2 nt long. In some embodiments, a CpG oligonucleotide or a chirally controlled CpG oligonucleotide composition which comprises a strand comprising a CpG region motif disclosed herein can be no more than 3 nt long. In some embodiments, a CpG oligonucleotide or a chirally controlled CpG oligonucleotide composition which comprises a strand comprising a CpG region motif disclosed herein can be no more than 4 nt long. In some embodiments, a CpG oligonucleotide or a chirally controlled CpG oligonucleotide composition which comprises a strand comprising a CpG region motif disclosed herein can be no more than 5 nt long. In some embodiments, a CpG oligonucleotide or a chirally controlled CpG oligonucleotide composition which comprises a strand comprising a CpG region motif disclosed herein can be no more than 6 nt long. In some embodiments, a CpG oligonucleotide or a chirally controlled CpG oligonucleotide composition which comprises a strand comprising a CpG region motif disclosed herein can be no more than 7 nt long. In some embodiments, a CpG oligonucleotide or a chirally controlled CpG oligonucleotide composition which comprises a strand comprising a CpG region motif disclosed herein can be no more than 8 nt long. In some embodiments, a CpG oligonucleotide or a chirally controlled CpG oligonucleotide composition which comprises a strand comprising a CpG region motif disclosed herein can be no more than 9 nt long. In some embodiments, a CpG oligonucleotide or a chirally controlled CpG oligonucleotide composition which comprises a strand comprising a CpG region motif disclosed herein can be no more than 10 nt long. In some embodiments, a CpG oligonucleotide or a chirally controlled CpG oligonucleotide composition which comprises a strand comprising a CpG region motif disclosed herein can be no more than 11 nt long. In some embodiments, a CpG oligonucleotide or a chirally controlled CpG oligonucleotide composition which comprises a strand comprising a CpG region motif disclosed herein can be no more than 12 nt long. In some embodiments, a CpG oligonucleotide or a chirally controlled CpG oligonucleotide composition which comprises a strand comprising a CpG region motif disclosed herein can be no more than 13 nt long. In some embodiments, a CpG oligonucleotide or a chirally controlled CpG oligonucleotide composition which comprises a strand comprising a CpG region motif disclosed herein can be no more than 14 nt long. In some embodiments, a CpG oligonucleotide or a chirally controlled CpG oligonucleotide composition which comprises a strand comprising a CpG region motif disclosed herein can be no more than 15 nt long. In some embodiments, a CpG oligonucleotide or a chirally controlled CpG oligonucleotide composition which comprises a strand comprising a CpG region motif disclosed herein can be no more than 16 nt long. In some embodiments, a CpG oligonucleotide or a chirally controlled CpG oligonucleotide composition which comprises a strand comprising a CpG region motif disclosed herein can be no more than 17 nt long. In some embodiments, a CpG oligonucleotide or a chirally controlled CpG oligonucleotide composition which comprises a strand comprising a CpG region motif disclosed herein can be no more than 18 nt long. In some embodiments, a CpG oligonucleotide or a chirally controlled CpG oligonucleotide composition which comprises a strand comprising a CpG region motif disclosed herein can be no more than 19 nt long. In some embodiments, a CpG oligonucleotide or a chirally controlled CpG oligonucleotide composition which comprises a strand comprising a CpG region motif disclosed herein can be no more than 20 nt long. In some embodiments, a CpG oligonucleotide or a chirally controlled CpG oligonucleotide composition which comprises a strand comprising a CpG region motif disclosed herein can be no more than 21 nt long. In some embodiments, a CpG oligonucleotide or a chirally controlled CpG oligonucleotide composition which comprises a strand comprising a CpG region motif disclosed herein can be no more than 22 nt long. In some embodiments, a CpG oligonucleotide or a chirally controlled CpG oligonucleotide composition which comprises a strand comprising a CpG region motif disclosed herein can be no more than 23 nt long. In some embodiments, a CpG oligonucleotide or a chirally controlled CpG oligonucleotide composition which comprises a strand comprising a CpG region motif disclosed herein can be no more than 24 nt long. In some embodiments, a CpG oligonucleotide or a chirally controlled CpG oligonucleotide composition which comprises a strand comprising a CpG region motif disclosed herein can be no more than 25 nt long. In some embodiments, a CpG oligonucleotide or a chirally controlled CpG oligonucleotide composition which comprises a strand comprising a CpG region motif disclosed herein can be no more than 26 nt long. In some embodiments, a CpG oligonucleotide or a chirally controlled CpG oligonucleotide composition which comprises a strand comprising a CpG region motif disclosed herein can be no more than 27 nt long. In some embodiments, a CpG oligonucleotide or a chirally controlled CpG oligonucleotide composition which comprises a strand comprising a CpG region motif disclosed herein can be no more than 28 nt long. In some embodiments, a CpG oligonucleotide or a chirally controlled CpG oligonucleotide composition which comprises a strand comprising a CpG region motif disclosed herein can be no more than 29 nt long. In some embodiments, a CpG oligonucleotide or a chirally controlled CpG oligonucleotide composition which comprises a strand comprising a CpG region motif disclosed herein can be no more than 30 nt long. In some embodiments, a CpG oligonucleotide or a chirally controlled CpG oligonucleotide composition which comprises a strand comprising a CpG region motif disclosed herein can be no more than 31 nt long. In some embodiments, a CpG oligonucleotide or a chirally controlled CpG oligonucleotide composition which comprises a strand comprising a CpG region motif disclosed herein can be no more than 32 nt long. In some embodiments, a CpG oligonucleotide or a chirally controlled CpG oligonucleotide composition which comprises a strand comprising a CpG region motif disclosed herein can be no more than 33 nt long. In some embodiments, a CpG oligonucleotide or a chirally controlled CpG oligonucleotide composition which comprises a strand comprising a CpG region motif disclosed herein can be no more than 34 nt long. In some embodiments, a CpG oligonucleotide or a chirally controlled CpG oligonucleotide composition which comprises a strand comprising a CpG region motif disclosed herein can be no more than 35 nt long. In some embodiments, a CpG oligonucleotide or a chirally controlled CpG oligonucleotide composition which comprises a strand comprising a CpG region motif disclosed herein can be no more than 36 nt long. In some embodiments, a CpG oligonucleotide or a chirally controlled CpG oligonucleotide composition which comprises a strand comprising a CpG region motif disclosed herein can be no more than 37 nt long. In some embodiments, a CpG oligonucleotide or a chirally controlled CpG oligonucleotide composition which comprises a strand comprising a CpG region motif disclosed herein can be no more than 38 nt long. In some embodiments, a CpG oligonucleotide or a chirally controlled CpG oligonucleotide composition which comprises a strand comprising a CpG region motif disclosed herein can be no more than 39 nt long. In some embodiments, a CpG oligonucleotide or a chirally controlled CpG oligonucleotide composition which comprises a strand comprising a CpG region motif disclosed herein can be no more than 40 nt long. In some embodiments, a CpG oligonucleotide or a chirally controlled CpG oligonucleotide composition which comprises a strand comprising a CpG region motif disclosed herein can be no more than 41 nt long. In some embodiments, a CpG oligonucleotide or a chirally controlled CpG oligonucleotide composition which comprises a strand comprising a CpG region motif disclosed herein can be no more than 42 nt long. In some embodiments, a CpG oligonucleotide or a chirally controlled CpG oligonucleotide composition which comprises a strand comprising a CpG region motif disclosed herein can be no more than 43 nt long. In some embodiments, a CpG oligonucleotide or a chirally controlled CpG oligonucleotide composition which comprises a strand comprising a CpG region motif disclosed herein can be no more than 44 nt long. In some embodiments, a CpG oligonucleotide or a chirally controlled CpG oligonucleotide composition which comprises a strand comprising a CpG region motif disclosed herein can be no more than 45 nt long. In some embodiments, a CpG oligonucleotide or a chirally controlled CpG oligonucleotide composition which comprises a strand comprising a CpG region motif disclosed herein can be no more than 46 nt long. In some embodiments, a CpG oligonucleotide or a chirally controlled CpG oligonucleotide composition which comprises a strand comprising a CpG region motif disclosed herein can be no more than 47 nt long. In some embodiments, a CpG oligonucleotide or a chirally controlled CpG oligonucleotide composition which comprises a strand comprising a CpG region motif disclosed herein can be no more than 48 nt long. In some embodiments, a CpG oligonucleotide or a chirally controlled CpG oligonucleotide composition which comprises a strand comprising a CpG region motif disclosed herein can be no more than 49 nt long.

[1624] In some embodiments, a CpG oligonucleotide or a chirally controlled CpG oligonucleotide composition which comprises a strand comprising a CpG region motif disclosed herein can be 2 to 49 nucleotides (wherein a nucleotide includes nucleotides, modified nucleotides and/or nucleotide analogs). In some embodiments, a CpG oligonucleotide or a chirally controlled CpG oligonucleotide composition which comprises a strand comprising a CpG region motif disclosed herein can be 5 to 49 nucleotides (wherein a nucleotide includes nucleotides, modified nucleotides and/or nucleotide analogs). In some embodiments, a CpG oligonucleotide or a chirally controlled CpG oligonucleotide composition which comprises a strand comprising a CpG region motif disclosed herein can be 10 to 49 nucleotides (wherein a nucleotide includes nucleotides, modified nucleotides and/or nucleotide analogs). In some embodiments, a CpG oligonucleotide or a chirally controlled CpG oligonucleotide composition which comprises a strand comprising a CpG region motif disclosed herein can be 15 to 49 nucleotides (wherein a nucleotide includes nucleotides, modified nucleotides and/or nucleotide analogs). In some embodiments, a CpG oligonucleotide or a chirally controlled CpG oligonucleotide composition which comprises a strand comprising a CpG region motif disclosed herein can be 16 to 49 nucleotides (wherein a nucleotide includes nucleotides, modified nucleotides and/or nucleotide analogs). In some embodiments, a CpG oligonucleotide or a chirally controlled CpG oligonucleotide composition which comprises a strand comprising a CpG region motif disclosed herein can be 17 to 49 nucleotides (wherein a nucleotide includes nucleotides, modified nucleotides and/or nucleotide analogs). In some embodiments, a CpG oligonucleotide or a chirally controlled CpG oligonucleotide composition which comprises a strand comprising a CpG region motif disclosed herein can be 18 to 49 nucleotides (wherein a nucleotide includes nucleotides, modified nucleotides and/or nucleotide analogs). In some embodiments, a CpG oligonucleotide or a chirally controlled CpG oligonucleotide composition which comprises a strand comprising a CpG region motif disclosed herein can be 19 to 49 nucleotides (wherein a nucleotide includes nucleotides, modified nucleotides and/or nucleotide analogs). In some embodiments, a CpG oligonucleotide or a chirally controlled CpG oligonucleotide composition which comprises a strand comprising a CpG region motif disclosed herein can be 20 to 49 nucleotides (wherein a nucleotide includes nucleotides, modified nucleotides and/or nucleotide analogs). In some embodiments, a CpG oligonucleotide or a chirally controlled CpG oligonucleotide composition which comprises a strand comprising a CpG region motif disclosed herein can be 21 to 49 nucleotides (wherein a nucleotide includes nucleotides, modified nucleotides and/or nucleotide analogs). In some embodiments, a CpG oligonucleotide or a chirally controlled CpG oligonucleotide composition which comprises a strand comprising a CpG region motif disclosed herein can be 22 to 49 nucleotides (wherein a nucleotide includes nucleotides, modified nucleotides and/or nucleotide analogs). In some embodiments, a CpG oligonucleotide or a chirally controlled CpG oligonucleotide composition which comprises a strand comprising a CpG region motif disclosed herein can be 23 to 49 nucleotides (wherein a nucleotide includes nucleotides, modified nucleotides and/or nucleotide analogs). In some embodiments, a CpG oligonucleotide or a chirally controlled CpG oligonucleotide composition which comprises a strand comprising a CpG region motif disclosed herein can be 24 to 49 nucleotides (wherein a nucleotide includes nucleotides, modified nucleotides and/or nucleotide analogs). In some embodiments, a CpG oligonucleotide or a chirally controlled CpG oligonucleotide composition which comprises a strand comprising a CpG region motif disclosed herein can be 25 to 49 nucleotides (wherein a nucleotide includes nucleotides, modified nucleotides and/or nucleotide analogs). In some embodiments, a CpG oligonucleotide or a chirally controlled CpG oligonucleotide composition which comprises a strand comprising a CpG region motif disclosed herein can be 30 to 49 nucleotides (wherein a nucleotide includes nucleotides, modified nucleotides and/or nucleotide analogs). In some embodiments, a CpG oligonucleotide or a chirally controlled CpG oligonucleotide composition which comprises a strand comprising a CpG region motif disclosed herein can be 35 to 49 nucleotides (wherein a nucleotide includes nucleotides, modified nucleotides and/or nucleotide analogs). In some embodiments, a CpG oligonucleotide or a chirally controlled CpG oligonucleotide composition which comprises a strand comprising a CpG region motif disclosed herein can be 5 to 30 nucleotides (wherein a nucleotide includes nucleotides, modified nucleotides and/or nucleotide analogs). In some embodiments, a CpG oligonucleotide or a chirally controlled CpG oligonucleotide composition which comprises a strand comprising a CpG region motif disclosed herein can be 10 to 30 nucleotides (wherein a nucleotide includes nucleotides, modified nucleotides and/or nucleotide analogs). In some embodiments, a CpG oligonucleotide or a chirally controlled CpG oligonucleotide composition which comprises a strand comprising a CpG region motif disclosed herein can be 15 to 30 nucleotides (wherein a nucleotide includes nucleotides, modified nucleotides and/or nucleotide analogs). In some embodiments, a CpG oligonucleotide or a chirally controlled CpG oligonucleotide composition which comprises a strand comprising a CpG region motif disclosed herein can be 20 to 30 nucleotides (wherein a nucleotide includes nucleotides, modified nucleotides and/or nucleotide analogs).

[1625] In some embodiments, the base sequence of a CpG oligonucleotide or a chirally controlled CpG oligonucleotide composition which comprises a strand comprising a CpG region motif disclosed herein is or comprises the base sequence related to SMAD7, GTCGCCCCTTCTCCCCGCAGC (SEQ ID NO: 1524).

[1626] In some embodiments, the base sequence of a CpG oligonucleotide or a chirally controlled CpG oligonucleotide composition which comprises a strand comprising a CpG region motif disclosed herein is or comprises a portion of the base sequence related to SMAD7, GTCGCCCCTTCTCCCCGCAGC (SEQ ID NO: 1524), including but not limited to: GC, CCCGCAG, GTCGCCCCTT (SEQ ID NO: 1525), GTCGC, CCG, CCGCA, CCCGCA, TCGCCCCTTCTCC (SEQ ID NO: 1526), CTCCCCGCAG (SEQ ID NO: 1527), TCGCCCC, CGCCCCTT, CGCAG, CTCCCCGCA, CCTTCTCCCCGCAGC (SEQ ID NO: 1528), CCCCG, TCGCC, TCGCCCCTTCTC (SEQ ID NO: 1529), TTCTCCCCGC (SEQ ID NO: 1530), GTCGCCCCTTCT (SEQ ID NO: 1531), CCCCGCAGC, CCCCGCA, GTCGCCCCT, TCGCCCCT, CCCTTCTCCCCGC (SEQ ID NO: 1532), TCTCCCCGCA (SEQ ID NO: 1533), CTTCTCCCCGCAG (SEQ ID NO: 1534), TCGCCCCTTCTCCCCGCA (SEQ ID NO: 1535), CGCCCCTTCTCCCCG (SEQ ID NO: 1536), CTTCTCCCCG (SEQ ID NO: 1537), TCCCCGC, TCCCCGCAG, CCCTTCTCCCCG (SEQ ID NO: 1538), GTCGCCCCTTC (SEQ ID NO: 1539), GTCGCCC, CCCCGCAG, GTCGCCCCTTCTCCCCGCA (SEQ ID NO: 1540), TCGCCCCTTCTCCCCG (SEQ ID NO: 1541), CGCCCCTTCTCC (SEQ ID NO: 1542), TCGCCCCTTCTCCCCGCAGC (SEQ ID NO: 1543), CGCCCCTTCTCCCCGCAG (SEQ ID NO: 1544), CGCCCCTTC, CGCCCCTTCTCCC (SEQ ID NO: 1545), GCCCCTTCTCCCCG (SEQ ID NO: 1546), TCG, TCTCCCCGCAG (SEQ ID NO: 1547), CTTCTCCCCGCAGC (SEQ ID NO: 1548), CGCCCCTTCTCCCCGCA (SEQ ID NO: 1549), TCGCCCCTT, CCGCAG, CCGC, GCCCCTTCTCCCCGCA (SEQ ID NO: 1550), CTCCCCGC, CGCCCCTTCTC (SEQ ID NO: 1551), GTCGCCCCTTCTCC (SEQ ID NO: 1552), TCCCCG, GCCCCTTCTCCCCGCAGC (SEQ ID NO: 1553), TTCTCCCCGCA (SEQ ID NO: 1554), TCGC, CCCTTCTCCCCGCAGC (SEQ ID NO: 1555), TCGCCCCTTCTCCC (SEQ ID NO: 1556), CGCCCCTTCTCCCCGCAGC (SEQ ID NO: 1557), CCCCTTCTCCCCGC (SEQ ID NO: 1558), CGCAGC, CTTCTCCCCGC (SEQ ID NO: 1559), TTCTCCCCGCAGC (SEQ ID NO: 1560), TTCTCCCCG, GTCGCCCCTTCTC (SEQ ID NO: 1561), TCTCCCCGC, CCTTCTCCCCGCAG (SEQ ID NO: 1562), CCGCAGC, CGC, CTCCCCG, GTCGCCCCTTCTCCCC (SEQ ID NO: 1563), GTCGCCCCTTCTCCC (SEQ ID NO: 1564), CCCCGC, CCCGC, GCCCCTTCTCCCCGC (SEQ ID NO: 1565), TCGCCCCTTCTCCCCGC (SEQ ID NO: 1566), GTCGCCCCTTCTCCCCGCAG (SEQ ID NO: 1567), CCTTCTCCCCGCA (SEQ ID NO: 1568), CGCCCCT, TCGCCCCTTCT (SEQ ID NO: 1569), CCCTTCTCCCCGCAG (SEQ ID NO: 1570), GTCGCCCCTTCTCCCCG (SEQ ID NO: 1571), CGCCCCTTCT (SEQ ID NO: 1572), CGCCCCTTCTCCCC (SEQ ID NO: 1573), CCCCTTCTCCCCGCAGC (SEQ ID NO: 1574), GCCCCTTCTCCCCGCAG (SEQ ID NO: 1575), TCGCCCCTTCTCCCCGCAG (SEQ ID NO: 1576), GTCG, CGCCCC, GTCGCC, TCGCCC, TTCTCCCCGCAG (SEQ ID NO: 1577), CTTCTCCCCGCA (SEQ ID NO: 1578), CCCCTTCTCCCCG (SEQ ID NO: 1579), TCGCCCCTTC (SEQ ID NO: 1580), GTCGCCCCTTCTCCCCGCAGC (SEQ ID NO: 1524), TCTCCCCGCAGC (SEQ ID NO: 1581), CGCCC, CCTTCTCCCCG (SEQ ID NO: 1582), TCCCCGCA, CTCCCCGCAGC (SEQ ID NO: 1583), TCTCCCCG, CCCTTCTCCCCGCA (SEQ ID NO: 1584), GTCGCCCC, CCCG, CCCCTTCTCCCCGCA (SEQ ID NO: 1585), TCGCCCCTTCTCCCC (SEQ ID NO: 1586), CCCCTTCTCCCCGCAG (SEQ ID NO: 1587), CCTTCTCCCCGC (SEQ ID NO: 1588), CCCGCAGC, GTCGCCCCTTCTCCCCGC (SEQ ID NO: 1589), TCCCCGCAGC (SEQ ID NO: 1590), CGCCCCTTCTCCCCGC (SEQ ID NO: 1591), CGCC, and CGCA.

[1627] In some embodiments, the base sequence of a CpG oligonucleotide or a chirally controlled CpG oligonucleotide composition which comprises a strand comprising a CpG region motif disclosed herein is or comprises the base sequence of ODN2006, TCGTCGTTTTGTCGTTTTGTCGTT (SEQ ID NO: 2).

[1628] In some embodiments, the base sequence of a CpG oligonucleotide or a chirally controlled CpG oligonucleotide composition which comprises a strand comprising a CpG region motif disclosed herein is or comprises a portion of the base sequence of ODN2006, TCGTCGTTTTGTCGTTTTGTCGTT (SEQ ID NO: 2), including but not limited to: GC, TTGTCGTTT, TTTGTCGTTTTGTCG (SEQ ID NO: 1592), GTCGT, TTGTCGTTTT (SEQ ID NO: 1593), TGTCG, GTCGTTTTGTCGTTTT (SEQ ID NO: 1594), TCGTCGTTTTGTCGTTTTGTCGT (SEQ ID NO: 1595), TCGTCGTTTTGTCGTTTTGTCG (SEQ ID NO: 1596), GTCGTT, CGTCGTTTTGTCGTTTTGT (SEQ ID NO: 1597), GTCGTTTTGTCGTTTTG (SEQ ID NO: 1598), TCGTCGTT, TTTTGTCGTTTT (SEQ ID NO: 1599), TCGTCGTTT, TTGTCG, TTTGTCGTTTTG (SEQ ID NO: 1600), CGTTTT, TGTCGTTTTGTC (SEQ ID NO: 1601), TTTTGTCGTTTTGTC (SEQ ID NO: 1602), TTGTCGTTTTGTCG (SEQ ID NO: 1603), CGTCGTTTTGTCGTTT (SEQ ID NO: 1604), CGTCGTTTTGT (SEQ ID NO: 1605), TTTTGTCGTTT (SEQ ID NO: 1606), TGTCGTTTTGTCGTT (SEQ ID NO: 1607), CGTCGTTTTGTCGTTTTG (SEQ ID NO: 1608), GTTTTGTCGTTTT (SEQ ID NO: 1609), GTCGTTT, CGTCGTTTTGTCGT (SEQ ID NO: 1610), TCGTTTTGTCGTT (SEQ ID NO: 1611), CGTCGTTTTGTCGTT (SEQ ID NO: 1612), CGTCGTTTTGTCG (SEQ ID NO: 1613), CGTCGTTTTGTC (SEQ ID NO: 1614), TCGTTTTGTCGTTTTGTC (SEQ ID NO: 1615), TTTGTCGTTTT (SEQ ID NO: 1616), TCGTTTTGTCGTTTTGTCG (SEQ ID NO: 1617), GTTTTGTCGTTTTGTC (SEQ ID NO: 1618), CGTCGTTTTG (SEQ ID NO: 1619), CGTCGTTTTGTCGTTTT (SEQ ID NO: 1620), GTTTTGTCGTT (SEQ ID NO: 1621), TCGTTT, TTTTGTCG, TCGTTTTGTC (SEQ ID NO: 1622), TCGTCG, TTTTGTCGTTTTGTCGT (SEQ ID NO: 1623), CGTTTTGTCGTTTTGTCGT (SEQ ID NO: 1624), TTTTGTCGTTTTGTCGTT (SEQ ID NO: 1625), GTTTTGTCGTTTTGTCGT (SEQ ID NO: 1626), TGTCGT, CGTCGTTTTGTCGTTTTGTCGT (SEQ ID NO: 1627), TCGTCGTTTTGTCGTTTT (SEQ ID NO: 1628), TGTCGTTTTGTCG (SEQ ID NO: 1629), TCGTTTTGTCGTTTTGTCGT (SEQ ID NO: 1630), TTGTCGT, TCG, CGTTTTGTCGTTTTGTCGTT (SEQ ID NO: 1631), TTTGTCGTTTTGT (SEQ ID NO: 1632), GTCGTTTTGTCGT (SEQ ID NO: 1633), CGTTTTGTCGTTTT (SEQ ID NO: 1634), TTGTCGTTTTGTCGT (SEQ ID NO: 1635), TTTTGTCGTT (SEQ ID NO: 1636), CGTTTTGTCGTTTTG (SEQ ID NO: 1637), TGTCGTTT, GTTTTGTCGTTTTGTCGTT (SEQ ID NO: 1638), TCGTTTTGTCGTTT (SEQ ID NO: 1639), TCGTCGTTTTGTCGTTT (SEQ ID NO: 1640), CGTCGTT, CGTCG, TTTGTCGT, TCGTTTTGTCGTTTTGTCGTT (SEQ ID NO: 1641), CGTTTTGTC, TGTCGTTTTGT (SEQ ID NO: 1642), TCGTCGTTTTGTCG (SEQ ID NO: 1643), TCGT, TGTCGTTTTG (SEQ ID NO: 1644), TCGTTTTGTCGTTTTGT (SEQ ID NO: 1645), GTTTTGTCGT (SEQ ID NO: 1646), GTTTTGTCGTTT (SEQ ID NO: 1647), TTGTCGTT, TCGTCGTTTTGTCGTTTTG (SEQ ID NO: 1648), CGTTTTGTCGTTTTGTC (SEQ ID NO: 1649), TCGTCGTTTTGTCGTTTTGTCGTT (SEQ ID NO: 2), CGTTTTGTCG (SEQ ID NO: 1650), CGT, TTGTCGTTTTGT (SEQ ID NO: 1651), TCGTC, GTCGTTTTGTCGTTTTGTCG (SEQ ID NO: 1652), CGTTTTGTCGTTTTGT (SEQ ID NO: 1653), GTCGTTTTGTCGTTTTGTC (SEQ ID NO: 1654), GTCGTTTTGTCGTTTTGTCGT (SEQ ID NO: 1655), TCGTCGTTTTGT (SEQ ID NO: 1656), GTCGTTTTGTCGTT (SEQ ID NO: 1657), TCGTT, GTTTTGTCGTTTTG (SEQ ID NO: 1658), TGTCGTT, CGTCGTTTTGTCGTTTTGTCG (SEQ ID NO: 1659), TCGTCGTTTTGTCGTT (SEQ ID NO: 1660), CGTTTTGT, TTTTGTCGTTTTGT (SEQ ID NO: 1661), TGTCGTTTTGTCGT (SEQ ID NO: 1662), TCGTTTTGTCGTTTT (SEQ ID NO: 1663), TCGTTTTGTCG (SEQ ID NO: 1664), TCGTCGTTTTG (SEQ ID NO: 1665), CGTT, TTTGTCGTTTTGTCGTT (SEQ ID NO: 1666), GTTTTGTCGTTTTGTCG (SEQ ID NO: 1667), GTCGTTTT, TTTTGTCGT, CGTC, GTCG, GTCGTTTTGTCG (SEQ ID NO: 1668), TTTTGTCGTTTTGTCG (SEQ ID NO: 1669), TGTCGTTTT, GTCGTTTTGTC (SEQ ID NO: 1670), TTTTGTCGTTTTG (SEQ ID NO: 1671), CGTTTTGTCGTTT (SEQ ID NO: 1672), CGTCGT, CGTTT, CGTTTTGTCGTTTTGTCG (SEQ ID NO: 1673), TCGTCGTTTTGTC (SEQ ID NO: 1674), TCGTCGTTTTGTCGTTTTGTC (SEQ ID NO: 1675), TTGTCGTTTTG (SEQ ID NO: 1676), TCGTTTTGT, TTTGTCGTTTTGTCGT (SEQ ID NO: 1677), GTCGTTTTGTCGTTTTGT (SEQ ID NO: 1678), TTTGTCGTTT (SEQ ID NO: 1679), TTGTCGTTTTGTC (SEQ ID NO: 1680), TTTGTCGTT, CGTCGTTTT, GTCGTTTTG, TCGTTTT, GTTTTGTCG, CGTCGTTTTGTCGTTTTGTC (SEQ ID NO: 1681), TCGTCGTTTTGTCGTTTTGT (SEQ ID NO: 1682), GTCGTTTTGT (SEQ ID NO: 1683), GTCGTTTTGTCGTTT (SEQ ID NO: 1684), TCGTTTTGTCGTTTTG (SEQ ID NO: 1685), TCGTCGT, CGTTTTGTCGTT (SEQ ID NO: 1686), TCGTCGTTTT (SEQ ID NO: 1687), CGTCGTTTTGTCGTTTTGTCGTT (SEQ ID NO: 1688), TCGTTTTGTCGT (SEQ ID NO: 1689), TCGTTTTG, CGTTTTGTCGT (SEQ ID NO: 1690), CGTTTTG, TTTGTCGTTTTGTC (SEQ ID NO: 1691), CGTCGTTT, TCGTCGTTTTGTCGT (SEQ ID NO: 1692), GTTTTGTCGTTTTGT (SEQ ID NO: 1693), GTCGTTTTGTCGTTTTGTCGTT (SEQ ID NO: 1694), TTTGTCG, and TTGTCGTTTTGTCGTT (SEQ ID NO: 1695).

[1629] In some embodiments, the base sequence of a CpG oligonucleotide or a chirally controlled CpG oligonucleotide composition which comprises a strand comprising a CpG region motif disclosed herein is or comprises the base sequence related to SOD1, CCGTCGCCCTTCAGCACGCA (SEQ ID NO: 1696).

[1630] In some embodiments, the base sequence of a CpG oligonucleotide or a chirally controlled CpG oligonucleotide composition which comprises a strand comprising a CpG region motif disclosed herein is or comprises a portion of the base sequence related to SOD1, CCGTCGCCCTTCAGCACGCA (SEQ ID NO: 1696), including but not limited to: GC, TCAGCACGC, CGTCGCC, CGCCCTTCAGCA (SEQ ID NO: 1697), GTCGC, CCG, CCGTC, GCACG, GCACGCA, GTCGCCCTT, ACGCA, TCGCCCTTCAGCACG (SEQ ID NO: 1698), TCGCCCTTCAGCACGC (SEQ ID NO: 1699), GTCGCCCTTC (SEQ ID NO: 1700), CAGCACGCA, TCGCCCT, TCGCC, CACGCA, CCGTCGCCCTTCA (SEQ ID NO: 1701), CCGTCGCCC, CCGTCGC, CGTCGCCCTTCAG (SEQ ID NO: 1702), GTCGCCCTTCAGCACGC (SEQ ID NO: 1703), TCGCCCTTCAGCAC (SEQ ID NO: 1704), CTTCAGCACGC (SEQ ID NO: 1705), TCAGCACG, GTCGCCC, ACGC, CCGTCGCC, CGTCGCCCTTCAGCACGC (SEQ ID NO: 1706), CGTCGCCCTTCAGCACGCA (SEQ ID NO: 1707), CGTCGCCCT, TCAGCACGCA (SEQ ID NO: 1708), CGCCCTTCAGCACGC (SEQ ID NO: 1709), GCCCTTCAGCACG (SEQ ID NO: 1710), AGCACGC, TCGCCCTT, TCG, CCCTTCAGCACGCA (SEQ ID NO: 1711), CCCTTCAGCACG (SEQ ID NO: 1712), GCACGC, CGTCGCCCTTCAGCACG (SEQ ID NO: 1713), AGCACG, CAGCACGC, CCGT, GTCGCCCTTCAGCA (SEQ ID NO: 1714), TCGC, CACG, TCGCCCTTCA (SEQ ID NO: 1715), ACG, CCTTCAGCACGC (SEQ ID NO: 1716), CCGTCGCCCTTCAGCA (SEQ ID NO: 1717), GTCGCCCTTCAGC (SEQ ID NO: 1718), CCGTCGCCCTTCAGCACG (SEQ ID NO: 1719), CCGTCGCCCTT (SEQ ID NO: 1720), AGCACGCA, CCGTCGCCCTTCAG (SEQ ID NO: 1721), CTTCAGCACG (SEQ ID NO: 1722), TTCAGCACG, TCGCCCTTCAGCACGCA (SEQ ID NO: 1723), GTCGCCCTTCAG (SEQ ID NO: 1724), CGC, CGTCGCCCTTCAGCAC (SEQ ID NO: 1725), TCGCCCTTCAGC (SEQ ID NO: 1726), TCGCCC, GTCGCCCTTCA (SEQ ID NO: 1727), CGT, CGCCCTTCAGCACG (SEQ ID NO: 1728), CACGC, GTCGCCCTTCAGCACG (SEQ ID NO: 1729), CCGTCGCCCTTCAGCACGC (SEQ ID NO: 1730), CGCCCTTCA, CGTCGCCCTTCAGC (SEQ ID NO: 1731), CCGTCGCCCT (SEQ ID NO: 1732), GTCGCCCTTCAGCACGCA (SEQ ID NO: 1733), GCCCTTCAGCACGCA (SEQ ID NO: 1734), CTTCAGCACGCA (SEQ ID NO: 1735), CGCCCT, GTCGCCCTTCAGCAC (SEQ ID NO: 1736), CAGCACG, CGTCG, CGTC, CCGTCGCCCTTC (SEQ ID NO: 1737), CGTCGC, GTCG, GTCGCC, CCTTCAGCACG (SEQ ID NO: 1738), CGTCGCCC, CGCCCTTC, CGTCGCCCTTCAGCA (SEQ ID NO: 1739), CGCCCTTCAGCAC (SEQ ID NO: 1740), CCGTCG, CCCTTCAGCACGC (SEQ ID NO: 1741), CGTCGCCCTTCA (SEQ ID NO: 1742), TTCAGCACGCA (SEQ ID NO: 1743), CGCCCTT, CGCCC, GCCCTTCAGCACGC (SEQ ID NO: 1744), TCGCCCTTC, CGCCCTTCAGC (SEQ ID NO: 1745), CCGTCGCCCTTCAGC (SEQ ID NO: 1746), CCGTCGCCCTTCAGCACGCA (SEQ ID NO: 1696), CCTTCAGCACGCA (SEQ ID NO: 1747), CGCCCTTCAG (SEQ ID NO: 1748), CCGTCGCCCTTCAGCAC (SEQ ID NO: 1749), CGTCGCCCTT (SEQ ID NO: 1750), GTCGCCCT, CGCCCTTCAGCACGCA (SEQ ID NO: 1751), TCGCCCTTCAGCA (SEQ ID NO: 1752), TTCAGCACGC (SEQ ID NO: 1753), CGTCGCCCTTC (SEQ ID NO: 1754), CGCC, TCGCCCTTCAG (SEQ ID NO: 1755), and CGCA.

[1631] A CpG oligonucleotide or a chirally controlled CpG oligonucleotide composition which comprises a strand comprising a CpG region motif disclosed herein can have any length or base sequence suitable for allowing agonism of an immune response, antagonism of an immune response, or neither agonism nor antagonism of an immune response, as desired.

### Optional 5′ and 3′ end Modifications

[1632] In various embodiments, the CpG oligonucleotide can optionally comprise a 5′ end or 3′ end cap (also referenced as a “modification”), which is non-nucleotidic. By describing a 5′ end cap or 3′ end cap as “non-nucleotidic”, it is meant that a nucleotide comprises three components: a phosphate, a sugar (e.g., a ribose or deoxyribose) and a nucleobase, and a 3′ end cap does not comprise all three of the components.

[1633] The 5′ end cap can be selected, as non-limiting examples, from any of: a composition comprising GalNAc; a nucleotide lacking a 5′ phosphate or 5′-OH; a nucleotide lacking a 5′ phosphate or a 5′-OH and also comprising a 2-OMe or 2′-MOE modification; 5′-deoxy-2′—O-methyl modification; 5′-OME-dT; ddT; and 5′-OTr-dT. Any 5′ end cap known in the art can be used on a CpG oligonucleotide.

[1634] The 3′ end cap can be selected, as non-limiting examples, from any of: C3, C6, C8, C1O, C12, lithocholic acid, biphenyl, triethylene glycol, cyclohexyl, phenyl, adamantane, C3 amino, C7 amino, X027, X038, X050 to 52, X058 to 69, X097 to 98, X109 to 113, X1009 to 1028, and X1047 to 1049. See, for example, U.S. Pat. Nos. 8,084,600; 8,404,832; 8,404,831; 8,957,041; and WO 2015051366.

[1635] Any 3′ end cap known in the art can be used on a CpG oligonucleotide.

[1636] Any 5′ end cap can be used in combination with any 3′ end cap.

[1637] In various embodiments, the CpG oligonucleotide comprises a 5′ end cap; a 3′ end cap; a 5′ end cap and a 3′ end cap; or neither a 5′ nor a 3′ end cap.

[1638] Any CpG oligonucleotide comprising a strand comprising a CpG region motif described herein can optionally be used with any 5′ or 3′ end cap described herein or known in the art.

[1639] In some embodiments, provided CpG oligonucleotides comprise one or more lipid moieties. In some embodiments, lipid conjugation provides unexpectedly improved properties. In some embodiments, the present disclosure encompasses the surprising finding that lipid conjugation can effectively antagonize an immune response, e.g., that mediated by TLR9.

### Methods of Making CpG Oligonucleotides

[1640] Various methods for making chirally controlled oligonucleotide compositions can be utilized in accordance with the present disclosure. Example methods include those described in WO/2010/064146, WO/2011/005761, WO/2011/108682, WO/2012/039448, WO/2012/073857 WO/2013/012758, WO/2014/010250, WO/2014/012081, and WO/2015/107425, the oligonucleotide preparation methods of each of which are incorporated herein by reference.

Mouse versus Human TLR9 and CpG Immunogenicity

[1641] Various researchers have reported some differences in the immune responses involving CpG motifs and TLR9 in mouse and human systems. The TLR9 genes differ between the species, with the human and mouse sequences reportedly differing by 24%. Hemmi et al. 2000 Nature 408: 740-745. There is also reported variation between species in which cell types express TLR9. The TLR9 receptor is reportedly present in rodent but not in primate macrophages and myeloid dendritic cells (DC). In humans, TLR9 is reportedly expressed primarily by plasmacytoid DC and B cells. Hornung et al. 2002 J. Immun. 168: 4531-4537; Suzuki et al. 2004 Cancer Res. 64: 8754-8760; Kadowaki et al. 2001 J. Exp. Med. 194: 863-869; Bernasconi et al. 2003 Blood 101: 4500-4504.

[1642] For B-class oligonucleotides, the 6-mer motif 5′-GTCGTT-3′ reportedly represents the optimal human CpG motif, but 5′-GACGTT-3′ is the optimal murine CpG motif. Krieg et al. 1995 Nature 374: 546-549; Hartmann et al. 2000 J. Immunol. 164: 944-953; Hartmann et al. 2000 J. Immunol. 164: 1617-1624.

[1643] Pohar et al. also reported the differences between mouse and human B class CpG oligonucleotides. Pohar et al. 2015 J. Immunol. 195: 4396-4405.

[1644] Among other things, the present disclosure provides data surprisingly demonstrating that particular CpG region motifs differ in activity in mouse and human, in some embodiments, to a degree and/or extent unexpected prior to the present disclosure.

[1645] As shown herein, CpG oligonucleotides comprising the CpG region motif of N₁-(*S)-N₂-(*S)-C-(*S)-G-(*S)-N₃-(*S)-N₄-(*S) are agonistic in the mouse, but not the human. See, for example, WV-1384, which is shown to be agonistic in the mouse in FIG. 3, but not agonistic in human in FIG. 9.

[1646] Thus, the present disclosure demonstrates that studies in mice do not necessarily predict agonistic or antagonistic properties in human. For example, the different effects of chirality in mouse and human are shown by CpG ODNs WV-1384 and WV-1512. These two CpG ODNs, which are both all Sp, agonize the desired immune response in mouse, but not in human. CpG ODN WV-1384 (all Sp) shows agonist activity in mouse (FIGS. 1A and 2A), but not in human (FIG. 9A). Similarly, CpG ODN WV-1512, which is also all Sp, showed high activity in mouse (FIGS. 10A and 12A) but not in human (FIG. 13A). The present disclosure demonstrates, among other things, that data related to structural determinants of eliciting an immune response in mouse are not necessarily predictive of the immune response in human.

### Combination of CpG Oligonucleotide and Another Agent

[1647] In various embodiments, the present disclosure pertains to methods and compositions related to the combination of (a) a CpG oligonucleotide and (b) another active agent.

[1648] In various embodiments, the active agent (b) can be co-administered with the CpG and/or separately administered. The methods by which the CpG oligonucleotide and active agent (b) are administered can be the same or different, or they can be simultaneous or in any order. In various embodiments, the CpG oligonucleotide and active agent (b) can be combined in a single composition, or can be in separate compositions (which can be co-administered or separately administered).

[1649] In various embodiments, the active agent (b) can be a separate treatment for a disease afflicting a human patient.

[1650] In various embodiments, the human patient can be afflicted with cancer.

[1651] In some embodiments, an active agent is an antibody. In some embodiments, an antibody has therapeutic effect. In some embodiments, an active agent is a vaccine.

[1652] As a non-limiting example, ibrutinib is useful for treatment of lymphoma, and can be co-administered with a CpG oligonucleotide. Ibrutinib is an irreversible inhibitor of Bruton's tyrosine kiase, a key enzyme in the signaling pathway downstream of B-cell receptor, and an effective treatment against many types of B-cell lymphomas. The combination of intratumoral injection of CpG oligonucleotides with systemic treatment by ibrutinib resulted in eradication of the tumors not only in the injected site, but also at distant sites. Sagiv-Barfi et al. 2015 Blood 125: 2079-2086.

[1653] In various embodiments, the active agent (b) can be an immunologically active component, as the co-administration of a CpG and an immunologically active agent has been shown to increase the immunological response to the agent.

### Combination of a CpG and an Immunologically Active Agent

[1654] The present disclosure also encompasses a pharmaceutical composition comprising (a) a CpG oligonucleotide and (b) an immunologically active component; and, optionally, (c) an additional component.

[1655] The immunologically active component can comprise, for example, an immunogen, an antigen, e.g., a toxin, virus, bacterium, fungus, or other infectious agent, cancer antigen, pathogen, or component thereof.

[1656] Infectious Agent: An agent that can infect a subject, including, but not limited to, viruses, bacteria, and fungi.

[1657] Non-limiting examples of infectious virus include: Adenoviridae (most adenoviruses); Arena viridae (hemorrhagic fever viruses); Birnaviridae; Bungaviridae (for example, Hantaan viruses, bunga viruses, phleboviruses and Nairo viruses); Calciviridae (such as strains that cause gastroenteritis); Coronaviridae (for example, coronaviruses); enteroviruses, human coxsackie viruses, rhinoviruses, echoviruses); Filoviridae (for example, ebola viruses); Flaviridae (for example, dengue viruses, encephalitis viruses, yellow fever viruses); Hepadnaviridae (Hepatitis B virus); Herpesviridae (herpes simplex virus (HSV) 1 and HSV-2, varicella zoster virus, cytomegalovirus (CMV), herpes viruses); Iridoviridae (such as African swine fever virus); Orthomyxoviridae (for example, influenza viruses); Papovaviridae (papilloma viruses, polyoma viruses); Paramyxoviridae (for example, parainfluenza viruses, mumps virus, measles virus, respiratory syncytial virus); Parvoviridae (parvoviruses); Picornaviridae (for example, polio viruses, hepatitis A virus; Poxviridae (variola viruses, vaccinia viruses, pox viruses); Reoviridae (e.g., reoviruses, orbiviurses and rotaviruses); Retroviridae; Rhabdoviridae (for example, vesicular stomatitis viruses, rabies viruses); Togaviridae (for example, equine encephalitis viruses, rubella viruses); and unclassified viruses (for example, the etiological agents of Spongiform encephalopathies, the agent of delta hepatitis (thought to be a defective satellite of Hepatitis B virus), the agents of non-A, non-B Hepatitis (class 1=internally transmitted; class 2=parenterally transmitted (i.e., Hepatitis C); Norwalk and related viruses, and astroviruses).

[1658] Non-limiting examples of infectious bacteria include: Actinomyces israelli; Bacillus antracis; Bacteroides sp.; Borelia burgdorferi; Clostridium perfringers; Clostridium tetani; Corynebacterium diphtheriae; corynebacterium sp.; Enterobacter aerogenes; Enterococcus sp.; Erysipelothrix rhusiopathiae; Fusobacterium nucleatum; Haemophilus influenzae; Helicobacter pyloris; Klebsiella pneumoniae; Legionella pneumophilia; Leptospira; Listeria monocytogenes; Mycobacteria sps (such as, M. tuberculosis, M. avium, M. intracellulare, M. kansaii, M. gordonae); Neisseria meningitidis; Pasteurella multocida; pathogenic Campylobacter sp.; Staphylococcus aureus, Neisseria gonorrhoeae; Streptobacillus moniliformis; Streptococcus (anaerobic sps); Streptococcus (viridans group); Streptococcus agalactiae (Group B Streptococcus); Streptococcus Bovis; Streptococcus faecalis; Streptococcus pneumoniae; Streptococcus pyogenes (Group A Streptococcus); Treponema pallidum; and Treponema pertenue.

[1659] Non-limiting examples of infectious fungi include, but are not limited to, Cryptococcus neoformans; Histoplasma capsulatum; Coccidioides immitis; Blastomyces dermatitidis; Chlamydia trachomatis; and Candida albicans.

[1660] Other infectious organisms (such as protists) include: Plasmodium falciparum; and Toxoplasma gondii.

[1661] In various embodiments, the CpG oligonucleotide can be conjugated to the antigen. Various studies have reported that conjugation of a CpG oligonucleotide to an antigen can enhance antigen uptake and reduce the requirement for the quantity of antigen administered. Tighe et al. 2000 Eur. J. Immunol. 30: 1939-1947; Hartmann et al. 2003 Cancer Res. 63: 6478-6487.

[1662] The additional agent can comprise any one of more of, as various non-limiting examples: an additional adjuvant, a stabilizer, a preservative, an antibiotic, and a trace component.

[1663] The additional adjuvant can comprise any one or more of, as non-limiting examples: aluminium hydroxide, aluminium phosphate, an immunostimulatory agent, saponin-based adjuvant,

[1664] In various embodiments, the immunostimulatory agent can be an immunostimulatory nucleic acid or protein. In various embodiments, the additional immunostimulatory agent can be selected from Montanide ISA-51, GM-CSF, and IFA. Shirota et al. 2015. Stimulator of IFN Gene (STING) is also reported to act synergistically with CpG oligonucleotides as an adjuvant. Temizoz et al. 2014 Eur. J. Immun. 45: 1159-1169.

[1665] The stabilizer can comprise any one of more of, as non-limiting examples: an inorganic magnesium salt, such as magnesium sulfate or magnesium chloride, lactose, sorbitol, gelatin, monosodium glutamate, glycine.

[1666] The preservative can comprise any one of more of, as various non-limiting examples: Thiomersal, phenol, phenoxyethanol.

[1667] The antibiotic can comprise any one or more of, as various non-limiting examples: gentamicin, neomycin, penicillin, a beta-lactam,

[1668] A composition or pharmaceutical composition comprising a CpG oligonucleotide, and optionally an active component and/or an additional component, can be formulated and/or delivered using any composition or method known in the art.

[1669] For example, the composition can be formed as a microparticle, nanoparticle, lipid emulsion, or other delivery modality known in the art.

[1670] Any composition comprising a CpG oligonucleotide comprising a strand comprising a CpG region motif disclosed herein can be used in combination with any immunologically active agent, vaccine, adjuvant or antigen described herein or otherwise known in the art.

### Pharmaceutical Compositions Comprising a CpG Oligonucleotide

[1671] A pharmaceutical composition can comprise a CpG oligonucleotide comprising a strand comprising any CpG region motif disclosed herein.

[1672] In some embodiments, pharmaceutical compositions can be specially formulated for administration in solid or liquid form, including those adapted for the following: oral administration, for example, drenches (aqueous or non-aqueous solutions or suspensions), tablets, e.g., those targeted for buccal, sublingual, and systemic absorption, boluses, powders, granules, pastes for application to the tongue; parenteral administration, for example, by subcutaneous, intramuscular, intravenous or epidural injection as, for example, a sterile solution or suspension, or sustained-release formulation; topical application, for example, as a cream, ointment, or a controlled-release patch or spray applied to the skin, lungs, or oral cavity; intravaginally or intrarectally, for example, as a pessary, cream, or foam; sublingually; ocularly; transdermally; or nasally, pulmonary, and to other mucosal surfaces. A pharmaceutical composition comprising a CpG oligonucleotide can be delivered by intravenous infusion, subcutaneous injection, intramuscular injection, intranasal, intrathecal, topical, mucosal delivery, vaginal delivery, oral delivery, intrarectal delivery, conjunctival delivery, intraocular delivery, transcutaneous delivery, or any other modality known in the art.

[1673] This pharmaceutical composition can further comprise any component appropriate for delivery of the CpG oligonucleotide. Such components include, as non-limiting examples, a pharmaceutically acceptable salt, a pharmaceutically accept carrier.

[1674] Pharmaceutically acceptable salts are reported in the art. For example, S. M. Berge, et al. describes pharmaceutically acceptable salts in detail in J. Pharmaceutical Sciences, 66: 1-19 (1977). Any pharmaceutically acceptable salt described herein or reported in the art can be used in the compositions and methods of the present disclosure.

[1675] In some embodiments, in provided compositions provided oligonucleotides may exist as salts, preferably pharmaceutically acceptable salts, e.g., sodium salts, ammonium salts, etc. In some embodiments, a salt of a provided oligonucleotide comprises two or more cations, for example, in some embodiments, up to the number of negatively charged acidic groups (e.g., phosphate, phosphorothioate, etc.) in an oligonucleotide.

[1676] Pharmaceutically acceptable carriers are well known in the art. For example, acceptable carriers (e.g., pharmaceutically acceptable carriers), diluents, stabilizers, buffers, preservatives, etc., can be included as described infra.

[1677] A pharmaceutically acceptable carrier includes a pharmaceutically-acceptable material, composition or vehicle, such as a liquid or solid filler, diluent, excipient, or solvent encapsulating material, involved in carrying or transporting the subject compound from one organ, or portion of the body, to another organ, or portion of the body. Any pharmaceutically acceptable carrier described herein or reported in the art can be used in the compositions and methods of the present disclosure.

[1678] Any composition comprising a CpG oligonucleotide comprising a strand comprising a CpG region motif disclosed herein can be used in any pharmaceutical composition

### Methods of Delivery of a Pharmaceutical Composition Comprising a CpG Oligonucleotide

[1679] A pharmaceutical composition comprising a CpG oligonucleotide can be delivered using any method or device or other modality known in the art, including, but not limited, to any method of administration described herein.

[1680] As a non-limiting example: A pharmaceutical composition comprising a CpG oligonucleotide can be administered orally, topically, parenterally, by inhalation or spray, or rectally in dosage unit formulations containing conventional non-toxic pharmaceutically acceptable carriers, adjuvants and/or vehicles. The term parenteral as used herein includes percutaneous, subcutaneous, intravascular (e.g., intravenous), intramuscular, intraperitoneal, or intrathecal injection, or infusion techniques and the like. As another non-limiting example: A pharmaceutical composition comprising a CpG oligonucleotide can be delivered by intravenous infusion, subcutaneous injection, intramuscular injection, intranasal, intrathecal, topical, mucosal delivery, vaginal delivery, oral delivery, intrarectal delivery, conjunctival delivery, intraocular delivery, transcutaneous delivery, or any other modality known in the art.

[1681] Various methods of delivering CpG oligonucleotides are reported in the art. See, for example, Moldoveanu et al. 1998 Vaccine 16: 1216-1224; Gallichan et al. 2001 J. Immunol. 166: 3451-3457; McCluskie et al. 1998 J. Immunol. 161: 4463-4466; McCluskie et al. 2000 Vaccine 19: 413-422; Kwant et al. 2004 Vaccine 22: 3098-3104; Eastcott et al. 2001 Vaccine 19: 1636-1642; McCluskie et al. 2001 Vaccine 19: 950-957; Dong et al. 2005 Virology. Nesburn et al. 2005 Vaccine 23: 873-883; Berry et al. 2004 Infect. Immun. 72: 1019-1028; Dumais et al. 2002 J. Infect. Dis. 186: 1098-1105; Gallichan et al. 2001 J. Immunol. 166: 3451-3457; and Qin et al. 2014 Immunopharm. Immunotox. 36: 251-260.

[1682] The pharmaceutical composition can comprise an therapeutically effective amount or dosage of a CpG oligonucleotide.

[1683] Dosage levels of the order of from about 0.1 mg to about 140 mg per kilogram of body weight per day are useful in the treatment of the various conditions (about 0.5 mg to about 7 g per subject per day). The amount of active ingredient that can be combined with the carrier materials to produce a single dosage form varies depending upon the host treated and the particular mode of administration. Dosage unit forms generally contain between from about 1 mg to about 500 mg of an active ingredient. It is understood that the specific dose level for any particular subject depends upon a variety of factors including the activity of the specific compound employed, the age, body weight, general health, sex, diet, time of administration, route of administration, and rate of excretion, drug combination and the severity of the particular disease undergoing therapy.

[1684] Any composition comprising a CpG oligonucleotide comprising a strand comprising a CpG region motif disclosed herein can be used in any pharmaceutical composition described herein or otherwise known in the art, and can be used with any method of delivery described herein or otherwise known in the art.

Treatment of Injection Site Reactions and Adverse Effects Associated with Administration of Nucleic Acids

[1685] In at least some cases, subcutaneous or intramuscular injection of nucleic acids has resulted in injection site reaction (ISR), e.g., erythema, bruising, induration, inflammation, blistering, burning sensation, itching, discomfort, tenderness, pain, rash, hyperpigmentation, hypopigmentation, alopecia, desquamation, flare-ups, ulceration, necrosis, hematoma, vasculitis, leukocytoclastic vasculitis, infection, eczema, slow distribution of the nucleic acid out of the skin and/or immediate region of injection, etc. ISRs can vary in intensity, e.g., they can be mild, moderate or severe. ISRs can also vary in duration, from being transient to permanent. In many cases, an ISR is not desirable. Thus: In various embodiments, the present disclosure pertains to methods and compositions for administering to a patient in need thereof a therapeutically effective amount of a CpG oligonucleotide comprising a strand comprising a CpG region motif, further comprising the step of administering a method or composition which relieves an injection site reaction asssociated with administration of the CpG oligonucleotide, wherein the methods or compositions can be performed or administered in any order. Various such methods and compositions are known in the art. As non-limiting examples, the inflammatory potential of some nucleic acids is reported to be reduced by conjugation with GalNAc, chelation or formulation with particular nanoparticles, e.g., use of liphophilic molecules, basic peptides, folate, anisamide, polyamines, receptor binding molecules, or dynamic conjugates, or slowing and/or decreasing the amount or rate of administration. See, for example: Seth et al. 2012 Mol. Ther. 1: e47; van der Ree 2015 EASL; Gish et al. 2015 Antivir. Res. 121: 97-108. An method or composition known in the art for treating an injection site reaction can be combined with a method or composition pertaining to a CpG oligonucleotide of the present disclosure.

[1686] In at least some cases, ISRs are particularly common with CpG oligonucleotides or 5-methyl-cytosine-substituted nucleic acids, compared to other types of nucleic acids; however, in some cases, as an injection site reaction can be the result of immune stimulation, such a reaction can be tolerable or even preferable, depending on the site of injection.

[1687] In at least some cases, administration of nucleic acids is reported to lead to other adverse effects, including flu-like symptoms, fever, chills, myalgia, arthralgia, malaise, fatigue, nephrotoxicity, hepatotoxicity, thrombocytopenia, drug-induced vascular injury, decrease in platelets, glomerulopathy, vascular degeneration, perivascular inflammation, etc. See, for example, Frazier 2015 Tox. Path. 43: 78-89; Engelhardt et al. 2015 Toxicol. 1-10. In some embodiments, adverse effects are not desirable. However, various methods and compositions for treating adverse effects are known in the art. Modification of backbone chemistry, conjugation to various moieties, use of particular delivery compositions and methods, improved tissue penetration, enhanced intracellular target and less frequent dosing, and various other methods and compositions known in the art, can result in reduced adverse effects.

[1688] Thus: In various embodiments, the present disclosure pertains to methods and compositions for administering a patient in need thereof a therapeutically effective amount of a CpG oligonucleotide comprising a strand comprising a CpG region motif, further comprising the step of administering a method or composition which treats an adverse effect associated with administration of the CpG oligonucleotide, wherein the methods or compositions can be performed or administered in any order.

[1689] In some embodiments, the present disclosure describes various CpG region motifs which are immunostimulatory. If immunostimulation is not desirable for a nucleic acid, these particular motifs can be avoided in the design of the nucleic acid. Furthermore, various methods and compositions for reducing ISRs and adverse effects of nucleic acid administration can be used in combination with methods and compositions for administration of the nucleic acid, if immunostimulation is not desired.

### Methods of Use

[1690] The present disclosure pertains to, inter alia, compositions comprising a CpG oligonucleotide comprising one or more of any CpG region motif disclosed herein.

[1691] Such compositions can be used for any purpose previously described in the literature for CpG oligonucleotides. Agonistic CpG oligonucleotides can be used, as a non-limiting example, as an immunostimulatory agent, such as an adjuvant, vaccine or monotherapy. Antagonistic CpG oligonucleotides can be used to antagonize an immune response.

### Use of CpG Oligonucleotides as Adjuvants

[1692] An adjuvant enhances an immune response generated against an active component, e.g., a co-administered antigen (Ag).

[1693] There are several ways, described in the scientific literature, such as Shirota et al. 2015 Vaccines 3: 390-407, that an adjuvant can promote immunity:

[1694] Stabilizing or entrapping the antigen (Ag) to extend release and thus prolong immune stimulation;

[1695] Promoting an inflammatory response at the site of Ag deposition, thereby attracting activated macrophages and dendritic cells to improve Ag uptake and presentation; and

[1696] Presenting co-stimulatory signals to T and B cells to enhance induction of Ag-specific immunity.

[1697] As TLR9 agonists, CpG oligos are reportedly useful as vaccine adjuvants, and as mono- or combination therapies for the treatment of cancer and infectious and allergic diseases. Vollmer et al. 2009 Adv. Drug Del. Rev. 61: 195-204. CpG oligonucleotides can reportedly enhance both the humoral and cellular (Th1 cells and CTL) immune response elicited by vaccines against pathogens, allergens and/or tumors. Shirota et al. 2014 Expert Rev. Vaccines 13: 299-312. As reported by Shirota et al., to optimize the efficiency of antigen presentation by DCs requires that they encounter CpG oligonucleotides in the presence of the vaccine antigen. Co-delivery of the oligonucleotide plus antigen to the same APC accelerates the induction, reportedly increases the maximal level and extends the duration of the induced immune response. Klinman et al. 2009 Adv. Drug Del. Rev. 61: 248-255. It also supports modulation of antigen isotype and increases the immuogenicity of weak antigens. Klinman et al. 2004 Nat. Rev. Immun. 4: 249-258. For example, when ovalbumin or hepatitis B surface antigen vaccine were administered to CpG oligonucleotides, co-delivery to the same site reportedly significantly enhanced humoral protective immunity. Mutwiri et al. 2004 J. Control. Rel. 97: 1-17; Cooper et al. 2004 J. Clin. Immun. 24: 693-701; Maurer et al. 2002 Eur. J. Immun. 32: 2356-2364. A CpG oligonucleotide is reported to also accelerate the immune response. Co-administration of a CpG oligonucleotide reportedly reduced the timing of peak titer of antibody to an anthrax vaccine from day 46 to day 22. Rynkiewicz et al. Marked Enhancement of Antibody Response to Anthrax Vaccine Adsorbed with CPG 7909 in Healthy Volunteers, ICAAC, 2005. A CpG oligonucleotide can also reportedly reduce the amount of vaccine required to induce protection, in some cases up to 10-fold or more. The CpG oligonucleotide can thus reduce cost, increase safety, and increase the number of patients that can receive the vaccine if it is in short supply, as has occurred with some influenza vaccines. Weeratna et al. 2003 Immunol. Cell Biol. 81: 59-62. In at least some cases, a CpG oligonucleotide can reportedly alter or reprogram an immune response. The Th1-biased immune response induced by CpG oligos can reportedly facilitate the development of improved allergy vaccines, to reprogram the pathogenic Th2 allergic response. CpG oligos reportedly redirect the allergic Th2 response in allergic mice, preventing inflammatory disease manifestations. Kline et al. 1998 J. Immunol. 160: 2555-2559; Jain et al. 2002 J. Allergy Clin. Immunol. 110: 867-872.

[1698] In some embodiments, the CpG oligos can be used for reducing tumor size and/or tumor burden in a subject in need thereof. In some embodiments, the vaccine is designed to prevent or slow tumor growth. Various studies have reported the use of tumor vaccines adjuvanted with CpG oligonucleotides. Krieg et al. 2004 Curr. Oncol. Rep. 6: 88-95; Heckelsmiller et al. 2002 Eur. J. Immun. 32: 3235-3245; Muraoka et al. 2010 J. Immun. 185: 3768-3776; Junqueira et al. 2012 PloS ONE 7: e36245; Sin et al. 2013 Cancer Lett. 330: 190-199; Silva et al. 2015 J. Immun. 194: 2199-2207; Aurisicchio et al. 2009 Clin. Cancer Res. 15: 1575-1584; Jacobs et al. 2011 Int. J. Cancer 128: 897-907. In one report, combining a CpG oligonucleotide with a peptide vaccine trageting HPV16 E7 reportedly resulted in the elimination of tumors up to 250 mm3 in size, and delay in the growth of even larger tumors. Zwaveling et al. 2002 J. Immun. 169: 350-358. Eradication of very large tumors was reportedly observed in 50% of mice using a fusion protein vaccine targeting the E7 epitope in combination with CpG oligonucleotide plus a chemotherapeutic agent. Mansilla et al. 2012 Int. J. cancer 131: 641-651.

[1699] Several clinical trials have examined the use of CpG oligonucleotides combined with peptide-based vaccines targeting tumor antigens. Such antigens include Engerix-B HBV vaccine; MART-1 peptide vaccine (for patients with melanoma); multi-epitope peptide vaccine (including MART-1, gp100, and tyrosinase); and NY-ESO-1 peptide or LAGE-1 tumor antigen; Wilms' Tumor-1 antigen (WT-1); cancer-testis Ag peptides LY6K and TTK (for metstatic esophaegeal squamous cell carcinoma). Shirota et al.; Cooper et al. 2004 J. Clin. Immunol.; Speiser et al. 2010 J. Immunother. 33: 848-858; Speiser et al. 2005 J. Clin. Invest. 115: 739-746; Baumgaertner et al. 2012 Int. J. Cancer 130: 2607-2617; Tarhini et al. 2012 J. Immunother. 35: 359-366; Fourcade et al. 2008 J. Immunother. 31: 781-791; Valmori et al. 2007 Proc. Natl. Acad. Sci. USA 104: 8947-8952; Karbach et al. 2010 Int. J. Cancer 126: 909-918; Ohno et al. 2012 Anticancer Res. 32: 2263-2269; Iwahashi et al. 2010 Cancer Sci. 101: 2510-2517.

[1700] In various embodiments, the cancer is selected from cancers of the lung, breast, colon and rectum, skin, head and neck, brain, stomach, prostate, liver, cervix, intestine, and esophagus.

[1701] In various embodiments, the CpG oligonucleotide can be administered along with a chemotherapeutic agent. In various embodiments, the chemotherapeutic agent is selected from the group consisting of Anti-estrogens, Anthracyclins, Azacitidine, Azathioprine, Bleomycin, Busulfan, Carboplatin, Capecitabine, Cisplatin, Chlorambucil, Cyclophosphamide, Cytarabine, Dacarbazine, Daunorubicin, Docetaxel, Doxifluridine, Doxorubicin, Epirubicin, Epothilone, Etoposide, 5-Fluorouracil, Gemcitabine, Hydroxyurea, Idarubicin, Imatinib, Interferons, Mechlorethamine, Melphalan, Mercaptopurine, Methotrexate, Mitomycin C, Mitoxantrone, Oxaliplatin, Paclitaxel, Pemetrexed, Retinoic acid, Taxol, Taxotere, Tamoxifen, Teniposide, Thiotepa, Tioguanine, Valrubicin, Vinblastine, Vincristine, Vindesine, and Vinorelbine, and any combination thereof.

[1702] CpG oligonucleotides have also been reported to be useful in treatment of trauma, bacterial pneumonia and burns. Wanke-Jellinek et al. 2016 J. Imm. 196: 767-777.

[1703] The methods and compositions comprising a CpG oligonucleotide of the present disclosure can thus be used in treatment of any disease known in the art to be amenable to treatment with a CpG oligonucleotide.

Combining CpG Oligonucleotides with Additional Therapies

[1704] In various embodiments, the present disclosure pertains to treatment of a disease, the treatment comprising the step of administering a CpG oligonucleotide comprising a strand comprising one or more copies of a CpG region motif described herein, wherein the oligonucleotide is administered as a monotherapy or in combination with an additional therapy.

[1705] In various embodiments, the additional therapy can be selected from: a vaccine, an antibody, a cellular therapy, an immunotherapy, and antiangiogenic agent, a radiotherapy, a cryotherapy, and a chemotherapy.

[1706] In various embodiments, the vaccine can comprise an active component (e.g., an antigen).

### Use of Immunomodulatory CpG Oligonucleotides in Treating Inflammatory, Autoimmune and Other Diseases

[1707] Immunomodulatory CpG oligonucleotides can be administered as treatments, or co-administered with other treatments, for treatment and/or prevention of inflammatory diseases, autoimmune diseases, cancer, allergic, asthma, and other diseases.

[1708] In some embodiments, an immunomodulatory CpG oligonucleotide can be co-administered with an anti-inflammatory agent. In some embodiments, an antagonistic CpG oligonucleotide can be co-administered with an anti-inflammatory agent.

[1709] If it is desirable to limit inflammation, e.g., in a disease associated with excessive inflammation, an antagonistic CpG oligonucleotide can be co-administered with an anti-inflammatory agent.

[1710] In some embodiments, a disease associated with excessive inflammation is inflammatory bowel disease, hay fever, periodontitis, atherosclerosis, rheumatoid arthritis, or cancer (e.g., gallbladder carcinoma), Acne vulgaris, Asthma, Autoimmune diseases, Autoinflammatory diseases, Celiac disease, Chronic prostatitis, Glomerulonephritis, Hypersensitivities, Inflammatory bowel diseases, Pelvic inflammatory disease, Reperfusion injury, Rheumatoid arthritis, Sarcoidosis, Transplant rejection, Vasculitis, Interstitial cystitis, or Atherosclerosis. In some embodiments, a disease associated with excessive inflammation is inflammatory bowel disease. In some embodiments, an anti-inflammatory agent is a short chain fatty acid (SCFA). SCFAs include, as non-limiting examples, butyrate, propionate and acetate. SCFAs can be administered in several manners. SCFAs can, for example, be administered orally. In some embodiments, SCFAs can be administered as a component in the diet, e.g., via butyrated or acetylated starch. In some embodiments, SCFAs are produced in the digestive system of a subject by the fermentation of dietary fiber by normal, healthy gut flora. Butyrate and other SCFAs are reportedly antiinflammatory, inhibiting IL-12, IFN-gamma signalling, and NFKp. In contrast, TLR9 activation by agonistic CpG oligonucleotides is pro-inflammatory, with pro-inflammatory reactions mediated by Type I interferon and IL-12. Antagonistic CpG oligonucleotides can act synergistically with SCFAs. SCFAs are reportedly important as food for cells lining the mammalian colon (colonocytes); without butyrates for energy, colon cells reportedly undergo autophagy and die. Without wishing to be bound by any particular theory, the present disclosure notes that SCFAs reportedly benefit colonocytes by increasing energy production and cell proliferation, and may help protect against colon cancer; and butyrate reportedly possesses both preventive and therapeutic potential to counteract inflammation-mediated ulcerative colitis and colorectal cancer.

[1711] Antagonistic CpG oligonucleotides can be administered as treatments for inflammatory diseases and autoimmune diseases. In many autoimmune diseases, TLR7 and TLR9 have been reported to mediate inflammation induced by immune omplexes, leading to maintenance and progression of disease. Reportedly, activation of TLR7, TLR8 and TLR9 in pDC and mDC through the interaction of these receptors with the antimicrobial peptide LL37 complexed with self-RNA or DNA contributes to psoriasis development. In some embodiments, an antagonistic CpG oligonucleotide is used to treat psoriasis and other autoimmune diseases. In some embodiments, an antagonistic CpG oligonucleotide is capable of inhibiting skin inflammation mediated by IL-23; reduces IL-17; and/or increases IL-10.

[1712] In some embodiments, an antagonistic CpG oligonucleotide is used, alone or in combination with another agent, as a treatment of an autoimmune disease. In some embodiments, an autoimmune disease is selected from: arthritis, rheumatoid arthritis, and Systemic Lupus Erythematosus (SLE).

[1713] In various embodiments, an immunomodulatory CpG oligonucleotide is administered, or co-administered with another agent, in a treatment of cancer.

[1714] In some embodiments, an antagonistic CpG oligonucleotide is administered in treatment of cancer. In some embodiments, cancer is associated with inflammation (as non-limiting example, inflammation-mediated ulcerative colitis and colorectal cancer). In some embodiments, an antagonistic CpG oligonucleotide acts to counteract inflammation.

[1715] In some embodiments, an agonistic CpG oligonucleotide is administered, or co-administered with another agent, in a treatment of cancer. In some embodiments, an agonistic CpG oligonucleotide increase an immune response against cancer.

[1716] In some embodiments, an agonistic CpG oligonucleotide is co-administered with an immune checkpoint inhibitor, a PD-1 (programmed cell death protein 1) inhibitor, CD20 inhibitor (e.g., rituximab), an oncolytic virus, and/or an IDO-1 (indoleamine 2,3-dioxygenase 1) inhibitor, EGFR inhibitor, tyrosine kinase inhibitor, and/or a modulator of TIM3, CEACAM and/or LAG3, or a tumor-specific antibody, cellular therapy, antiangiogenic agent, radiotherapy, and/or chemotherapy, for a treatment of cancer. Some embodiments, , an agonistic CpG oligonucleotide is co-administered with an agent selected from: cetuximab, ipilimumab, and gefitinib. In various embodiments, an inhibitor is an antibody, a RNAi agent, a small molecule, a CRISPR, a TALEN, or other molecule capable of decreasing the activity and/or level of the target. In some embodiments, a cancer is selected from: Non-Hodgkin's Lymphoma (NHL), renal cell carcinoma, melanoma, metastatic melanoma, colorectal cancer, colon cancer, breast cancer, soft tissue cancer, hepatic cancer, lung cancer, or non-small cell lung cancer. In some embodiments, a cancer is selected from: Bladder Cancer, Breast Cancer, Colon and Rectal Cancer, Endometrial Cancer, Kidney Cancer, Leukemia, Lung Cancer, Melanoma, Non-Hodgkin Lymphoma, Pancreatic Cancer, Prostate Cancer, and Thyroid Cancer.

[1717] In some embodiments, an agonistic CpG oligonucleotide is co-administered with a checkpoint inhibitor. In some embodiments, an agonistic CpG oligonucleotide is co-administered with ipilimumab, a CTLA4 antibody. In some embodiments, an agonistic CpG oligonucleotide is co-administered with a checkpoint inhibitor for treatment of cancer. In some embodiments, an agonistic CpG oligonucleotide is co-administered with ipilimumab, a CTLA4 antibody for treatment of cancer. In some embodiments, an agonistic CpG oligonucleotide is co-administered with a checkpoint inhibitor for treatment of Non-Hodgkin's Lymphoma, renal cell carcinoma, melanoma, metastatic melanoma, colorectal cancer, colon cancer, breast cancer, soft tissue cancer, hepatic cancer, lung cancer, or non-small cell lung cancer. In some embodiments, an agonistic CpG oligonucleotide is co-administered with ipilimumab, a CTLA4 antibody for treatment of NHL, B-cell lymphoma, Waldenstrom's macroglobulinemia, renal cell carcinoma, melanoma, metastatic melanoma, lung cancer, or non-small cell lung cancer.

[1718] In some embodiments, an immunomodulatory CpG oligonucleotide is co-administered with a complement inhibitor. In some embodiments, an agonistic CpG oligonucleotide is co-administered with a complement inhibitor.

[1719] Complement is reportedly a major component of innate immunity and plays a crucial role in host defense. Crosstalk between TLR9 (and other Toll-Like Receptors) and complement has been reported. Hajishengallis et al. 2010 Trends Immunol. 31: 154-163; Song 2012 Tox. Pathol. 40: 174-182; and Hovland et al. 2015 Atherosclerosis 241: 480-494. Modified LDL-cholesterol reportedly activates complement and TLRs, leading to inflammation. Both complement and TLRs are upread in atherosclerosis. Activated complement regulates TLR signaling through the activities of G protein-coupled anaphylatoxin receptors C5aR and C3aR, intracellular signaling molecules such as MAPKs, and transcriptional factors such as NF-Kp. In some embodiments, an agonistic CpG oligonucleotide is co-administered with a complement inhibitor. In some embodiments, a complement inhibitor inhibits C3 or C5. In some embodiments, a complement inhibitor inhibits cleavage, hydrolysis and/or activation of C3 and/or C5. In some embodiments, a complement inhibitor inhibits C3 or C5. In some embodiments, a complement inhibitor inhibits a C5 convertase. In some embodiments, a complement inhibitor inhibits a C3 convertase.

[1720] In some embodiments, a CpG oligonucleotide can be administered alone or co-administered with another agent, and the CpG oligonucleotide can comprise a novel CpG region motif disclosed herein.

### Determination of Novel CpG Region Motifs

[1721] In the present disclosure, a variety of CpG oligonucleotides were used to explore, inter alia, the effect, if any, on immunogenicity mediated by the conformation of the phosphorothioates.

[1722] In various CpG oligonucleotides described in the literature, one or more phosphorothioesters have been replaced by a phosphorothioate. However, a phosphorothioate can exist in either of two conformations, Rp and Sp, as illustrated herein.

[1723] In some embodiments, the CpG region motif comprises at least one phosphorothioate in the Rp conformation and at least one phosphorothioate in the Sp conformation. In some embodiments, the present disclosure pertains to a composition comprising a CpG oligonucleotide comprising a strand comprising 14 to 49 nucleotides, wherein the strand comprises at least one copy of the CpG region motif N₁-(*R/S)-C-(*R/S)-G-(*R/S)-N₂, wherein at least one *R/S is a phosphorothioate in the Rp conformation and at least one *R/S is a phosphorothioate in the Sp conformation, and N₁ and N₂ are any nucleotide.

[1724] In most of the previously-described studies of CpG oligonucleotides, the conformation at the various phosphorothioates was not controlled. These previously-described oligos thus are, in fact, mixtures of molecules; as a group, they all have the same base sequence, and sequence of modifications, and sequence of phosphorothioates in their backbones, but they vary molecule by molecule in the stereochemistry of the phosphorothioate backbones.

[1725] In contrast, the present disclosure describes various novel CpG oligonucleotides which were created, which have been chirally controlled at the various phosphorothioates. Thus, many of the CpG oligos described herein have been designed to be stereopure, wherein at each position the phosphorothioate is stereodefined as Rp or Sp; many of the CpG oligos described herein thus are stereopure, rather than stereomixtures.

[1726] Other studies were performed in which each and every phosphorothioate in a CpG oligonucleotide was in the Rp conformation; or each and every phosphorothioate was in the Sp conformation.

[1727] Uniquely, the present disclosure presents data related to chirally controlled CpG oligonucleotides wherein the CpG region motif comprises at least one phosphorothioate in the Rp conformation and at least one phosphorothioate in the Sp conformation. The present disclosure presents data showing that various CpG region motifs with at least one phosphorothioate in the Rp conformation and at least one phosphorothioate in the Sp conformation are capable of, depending on the region motif, either agonizing or antagonizing an immune response.

### Effect of Chirality on CpG Region Motifs

[1728] Many CpG oligonucleotides were constructed in which the chirality (Rp or Sp) of the CpG motif and/or CpG region motif were chirally controlled; these are listed in Table 4 (including Tables 4A, 4B and 4C).

[1729] Certain CpG oligonucleotides were tested for their ability to agonize or antagonize an immune response in the mouse and the human. Certain experimental methods are presented in Examples and certain results shown in the Figures. Certain oligonucleotide sequences used are listed in Table 3, and the specific sequences of the CpG oligonucleotides are listed in Table 4 (Tables 4A to 4C).

The Present Disclosure Demonstrates that Stereochemistry of Chiral Internucleotidic Linkages has Effects on Agonism and Antagonism Mediated by CpG Oligonucleotides

[1730] Without being bound by any particular theory, the present disclosure notes that several findings arise from the data disclosed herein.

[1731] In some embodiments, the present disclosure demonstrates that a pattern of chirality of the phosphorothioates in the CpG region motifs greatly alters the agonism or antagonism of an immune response mediated by a CpG oligonucleotide.

[1732] In some embodiments, the chirality of the phosphorothioate in the CpG dinucleotide as well as the flanking phosphorothioates affects the immune response.

[1733] In some embodiments, a CpG oligonucleotide which is a stereomixture may be able to mediate a certain level of agonism, but a stereopure version of this oligonucleotide may show different activity. For example, WV-1494 is a stereomixture which show modest agonism, but a stereopure version of this molecule, WV-1512, which has the same sequence but controlled stereochemistry, is very agonistic (see FIG. 12). Similarly, WV-499, a stereomix, shows essentially no agonism, but a stereopure variant with the same sequence and different sequence of stereochemistry, WV-966, is very active (see FIG. 4).

[1734] In some embodiments, not all stereopure variants of a particular base sequence are equally active. For example, WV-1373, WV-1375 and WV-1384 all share the same base sequence and are all stereopure. However, they differ in the stereochemistry (the sequence of Rp and Sp in the CpG region motif) and greatly differ in ability to agonize an immune response (see FIG. 2).

[1735] In some embodiments, various CpG region motifs, defined at least in part by the sequence of stereochemistry, are either agonistic or antagonistic.

[1736] Various CpG region motifs are described herein, e.g., in Table 1.

[1737] In some embodiments, some are associated with agonism, while others are associated with antagonism.

[1738] As non-limiting examples, some of the CpG region motifs associated with agonism are:
[1739] N₁-(*R)-C-(*R)-G-(*S)-N₂
[1740] N₁-(*R)-C-(*S)-G-(*S)-N₂
[1741] N₁-(*R/S)-C-(*R/S)-G-(*R/S)-N₂
[1742] N₁-(*R/S)-C-(*R/S)-G-(*R/S)-N₂, wherein at least one *R/S is *R and at least one *R/S is *S
[1743] N₁-(*R/S)-C-(*R/S)-G-(*R/S)-N₂, wherein at least one *R/S is *R and at least one *R/S is *S, and wherein C is unmethylated

[1744] In these CpG region motifs, *R/S indicates a phosphorothioate which can be either *R or *S in a stereopure (e.g., a pure or mostly pure) preparation.

[1745] As non-limiting examples, some of the CpG region motifs associated with antagonism are:
[1746] N₁-(*R)-[C]-(*R)-[G]-(*R)-N₂, where N₁ is 2′H, 2′-MOE or 2′-OMe; [C] is C, m5C, 2′-MOE C, or 2′-MOE m5C; [G] is optionally G, 2′-Ome G, or 2′-MOE G; and N₂ is 2′H, 2′-MOE or 2′-OMe.
[1747] N₁-(*S)-[C]-(*R)-[G]-(*S)-N₂, where N₁ is 2′H, 2′-MOE or 2′-OMe; [C] is C, m5C, 2′-MOE C, or 2′-MOE m5C; [G] is optionally G, 2′-Ome G, or 2′-MOE G; and N₂ is 2′H, 2′-MOE or 2′-OMe.
[1748] N₁-(*S)-[C]-(*R)-[G]-(*S)-N₂, where N₁ is 2′H; [C] is C, m5C, 2′-MOE C, or 2′-MOE m5C; [G] is optionally G, 2′-Ome G, or 2′-MOE G; and N₂ is 2′H.

[1749] Various CpG region motifs associated with agonism or antagonism are described herein.

[1750] In some embodiments, CpG region motifs comprising a 5mC agonize an immune response.

[1751] Previous work has reported that generally bacterial DNA comprising a CpG motif with an unmethylated C is immunogenic, while mammalian nuclear DNA comprising a CpG motif with a methylated C is not.

[1752] The present disclosure reveals that some immunostimulatory CpG oligonucleotides can comprise a CpG with a methylated C.

[1753] As non-limiting examples, these include the following CpG region motifs:
[1754] m5C-(*R)-m5C-(*R)-G-(*R)-N₁, where all the nucleosides are 2′-MOE.
[1755] m5C-(*R)-m5C-(*R)-G-(*R)-Py, where all the nucleosides are 2′-MOE.
[1756] N₁-(*R)-m5C-(*R)-G-(*R)-N₂, wherein N₁ is methylated or not methylated, and all the nucleosides are 2′-MOE.
[1757] N₁-(*R)-m5C-(*R)-G-(*R)-Py, wherein N₁ is methylated or not methylated, and all the nucleosides are 2′-MOE.

[1758] Various other immunostimulatory CpG region motifs comprising a methylated C are disclosed herein.

[1759] In some embodiments, mouse and human results with CpG oligonucleotides are not necessarily correlated.

[1760] The present disclosure reveals that, with stereochemically defined molecules, the same results are not necessarily found in mouse and human.

[1761] For example, CpG oligonucleotide WV-1512 is agonistic in mouse, but not in human (see FIGS. 10 and 13). Similarly, CpG oligonucleotide WV-1384 is agonistic in the mouse, but not in the human (see FIGS. 1 and 9). Other CpG oligonucleotides have shown different effects in the mouse and human.

### Base Sequences of Some CpG Oligonucleotides Used Herein

[1762] In the data shown in this disclosure, chirally controlled variants of known CpG oligonucleotides were constructed and tested for activity. These include those shown below in Table 3.

TABLE 3
CpG OLIGONUCLEOTIDE BASE SEQUENCES

| | Reported Sequence | |
|---|---|---|
| Series | (CpG is underlined) | Reference |
| SMAD7 series | GTCGCCCCTTCTCCCCGCAGC | U.S. Pat. No. 9,096,854; |
| | (SEQ ID NO: 1524) | Monteleone et al. 2015 |
| | | NEJM 372: 12. |
| ODN2006 series | TCGTCGTTTTGTCGTTTTGTCGTT | Vollmer et al. 2004 Eur. J. |
| | (SEQ ID NO: 2) | Immunol. 34: 251-262; |
| | | Mangsbo et al. 2009 J. |
| | | Immunol. 183: 6724- |
| | | 6732; Pohar et al. 2015 J. |
| | | Immunol. 194: 3901-3908. |
| SOD1 series | CCGTCGCCCTTCAGCACGCA | U.S. Pat. App. No. |
| | (SEQ ID NO: 1696) | 20120214865; Miller et al. |
| | | 2013 Lancet Neurol. 12: |
| | | 435; Fratta 2013 Lancet |
| | | Neurol. 12: 416-417. |

[1763] CpG oligonucleotides used in the present disclosure are of various classes. They also differ in significant ways. For example, they differ in length (for example, ranging from 20 to 24) and in the number of CpG region motifs (for example, from 2 to 4). Example CpG oligonucleotides also differ in the position of the furthest upstream (most 5′) CpG, as some are 1 nt and some are 2 nt from the 5′ end. They also differ in the position of the furthest downstream (most 3′) CpG, as some are 2 nt and some are 4 nt from the 3′ end. The tested CpG oligonucleotides also differ in distances between their CpG motifs; for example, some distances are as short as 1 nt and as long as 11 nt. The tested CpG oligonucleotides also differ in the base sequences flanking the CpG motifs. The tested CpG oligonucleotides thus are of considerable diversity.

[1764] The SMAD7 series CpG oligonucleotide used in the present disclosure is also designated Mongersen, formerly GED0301, for the treatment of Crohn's disease (CD). CD-related inflammation is characterized by reduced activity of the immuno suppressive cytokine transforming growth factor β1 (TGF-β1) due to high levels of SMAD7, an inhibitor of TGF-B1 signaling. Mongersen targets ileal and colonic SMAD7. In a phase 2 clinical trial, study participants with CD who received Mongersen had significantly higher rates of remission and clinical response than those who received placebo. U.S. Pat. No. 9,096,854; Monteleone et al. 2015 NEJM 372: 12.

[1765] ODN2006 is a Class B CpG oligonucleotide, also known as ODN 2006, ODN 7909 or PF-3512676. It comprises four CpG motifs and has been extensively studied. ODN2006 is commercially available from InvivoGen, San Diego, CA, as Catalog #tlrl-2006, tlrl-2006-1, tlrl-2006-5. HEK-Blue™ TLR9 cells.

[1766] HEK-Blue™ TLR9 cells stably overexpress the TLR9 gene and an NF-κβ inducible secreted embryonic alkaline phosphatase (SEAP) reporter gene. Vollmer et al. 2004 Eur. J. Immunol. 34: 251-262; Mangsbo et al. 2009 J. Immunol. 183: 6724-6732. A systematic study was performed varying the length, number of CpG motifs and other parameters of ODN2006. Pohar et al. 2015 J. Immunol. 194: 3901-3908.

[1767] The SOD1 CpG oligonucleotide is also designated ISIS 333611. This is an antisense oligonucleotide targetting SOD1, for use in treatment of familial amyotrophic lateral sclerosis. This oligonucleotide was used in the first clinical study of intrathecal delivery of an antisense oligonucleotide; it was well tolerated, with no dose-limiting toxic effects or any safety or tolerability concerns related to the oligonucleotide. US Pat. App. No. 20120214865; Miller et al. 2013 Lancet Neurol. 12: 435; Fratta 2013 Lancet Neurol. 12: 416-417.

[1768] The sequences of various CpG oligonucleotides described in the present disclosure are listed below, in Table 4 (including Tables 4A, 4B and 4C).

TABLE 4A
CpG OLIGONUCLEOTIDE BASE SEQUENCES AND CHIRALITY
SMAD7 CpG OLIGONUCLEOTIDES

| WV-1372 | G*ST*Rm5C*RG*RC*SC*SC*SC*ST*ST*SC*ST*SC*SC*SC*Rm5C*RG*RC*SA*SG*SC | (SEQ ID NO: |
|---|---|---|
| | | 1756) |
| WV-1373 | G*ST*RC*RG*RC*SC*SC*SC*ST*ST*SC*ST*SC*SC*SC*RC*RG*RC*SA*SG*SC | (SEQ ID NO: |
| | | 1757) |
| WV-1374 | G*ST*Sm5C*RG*SC*SC*SC*SC*ST*ST*SC*ST*SC*SC*SC*Sm5C*RG*SC*SA*SG*SC | (SEQ ID NO: |
| | | 1758) |
| WV-1375 | G*ST*SC*RG*SC*SC*SC*SC*ST*ST*SC*ST*SC*SC*SC*SC*RG*SC*SA*SG*SC | (SEQ ID NO: |
| | | 1759) |
| WV-1376 | G*ST*Sm5Ceo*RGeo*SC*SC*SC*SC*ST*ST*SC*ST*SC*SC*SC*Sm5Ceo*RGeo*SC*SA* | (SEQ ID NO: |
| | SG*SC | 1760) |
| WV-1377 | G*ST*SCeo*RGeo*SC*SC*SC*SC*ST*ST*SC*ST*SC*SC*SC*SCeo*RGeo*SC*SA*SG*SC | (SEQ ID NO: |
| | | 1761) |
| WV-1378 | G*ST*Rm5Ceo*RGeo*RC*SC*SC*SC*ST*ST*SC*ST*SC*SC*SC*Rm5Ceo*RGeo*RC*SA* | (SEQ ID NO: |
| | SG*SC | 1762) |
| WV-1379 | G*ST*RCeo*RGeo*RC*SC*SC*SC*ST*ST*SC*ST*SC*SC*SC*RCeo*RGeo*RC*SA*SG*SC | (SEQ ID NO: |
| | | 1763) |
| WV-1380 | G*ST*Sm5mC*RmG*SC*SC*SC*SC*ST*ST*SC*ST*SC*SC*SC*Sm5mC*RmG*SC*SA*SG*SC | (SEQ ID NO: |
| | | 1764) |
| WV-1381 | G*ST*SmC*RmG*SC*SC*SC*SC*ST*ST*SC*ST*SC*SC*SC*SmC*RmG*SC*SA*SG*SC | (SEQ ID NO: |
| | | 1765) |
| WV-1382 | G*ST*Rm5mC*RmG*RC*SC*SC*SC*ST*ST*SC*ST*SC*SC*SC*Rm5mC*RmG*RC*SA*SG* | (SEQ ID NO: |
| | SC | 1766) |
| WV-1383 | G*ST*RmC*RmG*RC*SC*SC*SC*ST*ST*SC*ST*SC*SC*SC*RmC*RmG*RC*SA*SG*SC | (SEQ ID NO: |
| | | 1767) |
| WV-1384 | G*ST*SC*SG*SC*SC*SC*SC*ST*ST*SC*ST*SC*SC*SC*SC*SG*SC*SA*SG*SC | (SEQ ID NO: |
| | | 1768) |
| WV-1385 | G*RT*Rm5C*RG*RC*RC*RC*RC*RT*RT*RC*RT*RC*RC*RC*Rm5C*RG*RC*RA*RG*RC | (SEQ ID NO: |
| | | 1769) |
| WV-1386 | G*RT*RC*RG*RC*RC*RC*RC*RT*RT*RC*RT*RC*RC*RC*RC*RG*RC*RA*RG*RC | (SEQ ID NO: |
| | | 1770) |
| WV-1387 | Geo*RTeo*Rm5Ceo*RGeo*RCeo*RC*SC*SC*ST*ST*SC*ST*SC*SC*SC*Rm5Ceo* | (SEQ ID NO: |
| | RGeo*Aeo*RGeo*RCeoRCeo*R | 1771) |
| WV-1388 | Geo*RTeo*RCeo*RGeo*RCeo*RC*SC*SC*ST*ST*SC*ST*SC*SC*SC*RCeo*RGeo* | (SEQ ID NO: |
| | RCeo*RAeo*RGeo*RCeo | 1772) |
| WV-1389 | mG*RmU*Rm5mC*RmG*RmC*RC*SC*SC*ST*ST*SC*ST*SC*SC*SC*Rm5mC*RmG*RmC* | (SEQ ID NO: |
| | RmA*RmG*RmC | 1773) |
| WV-1390 | mG*RmU*RmC*RmG*RmC*RC*SC*SC*ST*ST*SC*ST*SC*SC*SC*RmC*RmG*RmC*RmA* | (SEQ ID NO: |
| | RmG*RmC | 1774) |
| WV-499 | G*T*m5C*G*C*C*C*C*T*T*C*T*C*C*C*m5C*G*C*A*G*C | (SEQ ID NO: |
| | | 1775) |
| WV-901 | G*ST*Sm5C*SG*SC*SC*SC*SC*ST*ST*RC*ST*SC*RC*SC*Sm5C*SG*SC*SA*SG*SC | (SEQ ID NO: |
| | | 1776) |
| WV-966 | G*ST*Sm5C*SG*SC*SC*SC*SC*ST*ST*SC*ST*SC*SC*SC*Sm5C*SG*SC*SA*SG*SC | (SEQ ID NO: |
| | | 1777) |
| WV-1517 | G*T*C*G*C*C*C*C*T*T*C*T*C*C*C*m5C*G*C*A*G*C | (SEQ ID NO: |
| | | 1778) |
| WV-1518 | G*T*m5C*G*C*C*C*C*T*T*C*T*C*C*C*C*G*C*A*G*C | (SEQ ID NO: |
| | | 1779) |
| WV-1371 | G*T*C*G*C*C*C*C*T*T*C*T*C*C*C*C*G*C*A*G*C | (SEQ ID NO: |
| | | 1780) |

TABLE 4B
ODN2006 SERIES CpG OLIGONUCLEOTIDES

| | | |
|---|---|---|
| WV-1694 | T*SC*SG*ST*SC*SG*ST*ST*ST*ST*SG*ST*SC*SG*ST*ST*ST*ST*SG*ST*SC*SG*ST*ST | (SEQ ID |
| | | NO: 1781) |
| WV-1695 | T*RC*SG*ST*RC*SG*ST*ST*ST*ST*SG*ST*RC*SG*ST*ST*ST*ST*SG*ST*RC*SG*ST*ST | (SEQ ID |
| | | NO: 1782) |
| WV-1696 | T*SC*RG*ST*SC*RG*ST*ST*ST*ST*SG*ST*SC*RG*ST*ST*ST*ST*SG*ST*SC*RG*ST*ST | (SEQ ID |
| | | NO: 1783) |
| WV-1697 | T*SC*SG*RT*SC*SG*RT*ST*ST*ST*SG*ST*SC*SG*RT*ST*ST*ST*SG*ST*SC*SG*RT*ST | (SEQ ID |
| | | NO: 1784) |
| WV-1698 | T*RC*RG*ST*RC*RG*ST*ST*ST*ST*SG*ST*RC*RG*ST*ST*ST*ST*SG*ST*RC*RG*ST*ST | (SEQ ID |
| | | NO: 1785) |
| WV-1699 | T*SC*RG*RT*SC*RG*RT*ST*ST*ST*SG*ST*SC*RG*RT*ST*ST*ST*SG*ST*SC*RG*RT*ST | (SEQ ID |
| | | NO: 1786) |
| WV-1700 | T*RC*SG*RT*RC*SG*RT*ST*ST*ST*SG*ST*RC*SG*RT*ST*ST*ST*SG*ST*RC*SG*RT*ST | (SEQ ID |
| | | NO: 1787) |
| WV-1701 | T*RC*RG*RT*RC*RG*RT*ST*ST*ST*SG*ST*RC*RG*RT*ST*ST*ST*SG*ST*RC*RG*RT*ST | (SEQ ID |
| | | NO: 1788) |
| WV-1702 | ST*ST*ST*SG*ST*RC*SG*ST*ST*ST*ST*SG*ST | (SEQ ID |
| | | NO: 1789) |
| WV-1703 | ST*ST*ST*SG*ST*SC*RG*ST*ST*ST*ST*SG*ST | (SEQ ID |
| | | NO: 1790) |
| WV-1704 | ST*ST*ST*SG*ST*SC*SG*RT*ST*ST*ST*SG*ST | (SEQ ID |
| | | NO: 1791) |
| WV-1705 | ST*ST*ST*SG*ST*RC*RG*ST*ST*ST*ST*SG*ST | (SEQ ID |
| | | NO: 1792) |
| WV-1706 | ST*ST*ST*SG*ST*SC*RG*RT*ST*ST*ST*SG*ST | (SEQ ID |
| | | NO: 1793) |
| WV-1707 | ST*ST*ST*SG*ST*RC*SG*RT*ST*ST*ST*SG*ST | (SEQ ID |
| | | NO: 1794) |
| WV-1708 | ST*ST*ST*SG*ST*RC*RG*RT*ST*ST*ST*SG*ST | (SEQ ID |
| | | NO: 1795) |

TABLE 4C
SOD1 SERIES CpG OLIGONUCLEOTIDES

| WV-458 | m5Ceo*m5Ceo*Geo*Teo*m5Ceo*G*m5C*m5C*m5C*T*T*m5C*A*G*m5C*Aeo*m5Ceo* | (SEQ ID NO: |
|---|---|---|
| | Geo*m5Ceo*Aeo | 1796) |
| WV-459 | m5C*m5C*G*T*m5C*G*m5C*m5C*m5C*T*T*m5C*A*G*m5C*A*m5C*G*m5C*A | (SEQ ID NO: |
| | | 1797) |
| WV-486 | m5Ceo*Sm5Ceo*SGeo*STeo*Sm5Ceo*SG*Sm5C*Sm5C*Sm5C*ST*ST*Sm5C*SA*SG* | (SEQ ID NO: |
| | Sm5C*SAeo*Sm5Ceo*SGeo*Sm5Ceo*SAeo | 1798) |
| WV-487 | m5Ceo*Sm5Ceo*SGeo*STeo*Sm5Ceo*SG*Sm5C*Sm5C*Sm5C*ST*ST*Sm5C*RA*SG* | (SEQ ID NO: |
| | Sm5C*SAeo*Sm5Ceo*SGeo*Sm5Ceo*SAeo | 1799) |
| WV-488 | m5Ceo*Rm5Ceo*RGeo*RTeo*Rm5Ceo*RG*Sm5C*Sm5C*Sm5C*ST*ST*Sm5C*RA*SG* | (SEQ ID NO: |
| | Sm5C*SAeo*Rm5Ceo*RGeo*Rm5Ceo*RAeo | 1800) |
| WV-1489 | m5Ceo*Rm5Ceo*SGeo*RTeo*Rm5Ceo*RG*Sm5C*Sm5C*Sm5C*ST*ST*Sm5C*RA*SG* | (SEQ ID NO: |
| | Sm5C*SAeo*Rm5Ceo*RGeo*Rm5Ceo*RAeo | 1801) |
| WV-1490 | m5Ceo*Rm5Ceo*RGeo*RTeo*Rm5Ceo*SG*Sm5C*Sm5C*Sm5C*ST*ST*Sm5C*RA*SG*S | (SEQ ID NO: |
| | m5C*SAeo*Rm5Ceo*RGeo*Rm5Ceo*RAeo | 1802) |
| WV-1491 | m5Ceo*Rm5Ceo*RGeo*RTeo*Rm5Ceo*RG*Sm5C*Sm5C*Sm5C*ST*ST*Sm5C*RA*SG* | (SEQ ID NO: |
| | Sm5C*SAeo*Rm5Ceo*SGeo*Rm5Ceo*RAeo | 1803) |
| WV-1492 | m5Ceo*Sm5Ceo*RGeo*STeo*Sm5Ceo*RG*Sm5C*Sm5C*Sm5C*ST*ST*Sm5C*RA*SG* | (SEQ ID NO: |
| | Sm5C*SAeo*Sm5Ceo*RGeo*Sm5Ceo*SAeo | 1804) |
| WV1493.02 | C*SC*RG*ST*SC*RG*SC*SC*SC*ST*ST*SC*RA*SG*SC*SA*SC*RG*SC*SA | (SEQ ID NO: |
| | | 1805) |
| WV1494.01 | C*C*G*T*C*G*C*C*C*T*T*C*A*G*C*A*C*G*C*A | (SEQ ID NO: |
| | | 1806) |
| WV1495.02 | m5C*Sm5C*RG*ST*Sm5C*RG*Sm5C*Sm5C*Sm5C*ST*ST*Sm5C*RA*SG*Sm5C*SA* | (SEQ ID NO: |
| | Sm5C*RG*Sm5C*SA | 1807) |
| WV1496.02 | C*SC*RG*ST*SC*RG*SC*SC*SC*ST*ST*SC*SA*SG*SC*SA*SC*RG*SC*SA | (SEQ ID NO: |
| | | 1808) |
| WV1512.02 | C*SC*SG*ST*SC*SG*SC*SC*SC*ST*ST*SC*SA*SG*SC*SA*SC*SG*SC*SA | (SEQ ID NO: |
| | | 1809) |
| WV1513.02 | C*SC*RG*ST*SC*SG*SC*SC*SC*ST*ST*SC*SA*SG*SC*SA*SC*SG*SC*SA | (SEQ ID NO: |
| | | 1810) |
| WV1514.02 | C*SC*SG*ST*SC*RG*SC*SC*SC*ST*ST*SC*SA*SG*SC*SA*SC*SG*SC*SA | (SEQ ID NO: |
| | | 1811) |
| WV1515.02 | C*SC*SG*ST*SC*SG*SC*SC*SC*ST*ST*SC*SA*SG*SC*SA*SC*RG*SC*SA | (SEQ ID NO: |
| | | 1812) |
| WV-1669 | m5Ceo*Sm5Ceo*SGeo*STeo*Sm5Ceo*SG*Sm5C*Sm5C*Sm5C*ST*ST*Sm5C*RA*SG* | (SEQ ID NO: |
| | Sm5C*SAeo*Sm5Ceo*SGeo*Sm5Ceo*SAeo-Biotin | 1813) |
| WV-1670 | m5Ceo*Rm5Ceo*RGeo*RTeo*Rm5Ceo*RG*Sm5C*Sm5C*Sm5C*ST*ST*Sm5C*RA*SG* | (SEQ ID NO: |
| | Sm5C*SAeo*Rm5Ceo*RGeo*Rm5Ceo*RAeo-Biotin | 1814) |
| WV-1671 | Biotin- | (SEQ ID NO: |
| | m5Ceo*Sm5Ceo*SGeo*STeo*Sm5Ceo*SG*Sm5C*Sm5C*Sm5C*ST*ST*Sm5C*RA*SG* | 1815) |
| | Sm5C*SAeo*Sm5Ceo*SGeo*Sm5Ceo*SAeo | |
| WV-1672 | Biotin- | (SEQ ID NO: |
| | m5Ceo*Rm5Ceo*RGeo*RTeo*Rm5Ceo*RG*Sm5C*Sm5C*Sm5C*ST*ST*Sm5C*RA*SG* | 1816) |
| | Sm5C*SAeo*Rm5Ceo*RGeo*Rm5Ceo*RAeo | |
| WV-1673 | m5Ceo*RAeo*RGeo*RTeo*Rm5Ceo*RG*Sm5C*Sm5C*Sm5C*ST*ST*Sm5C*RA*SG* | (SEQ ID NO: |
| | Sm5C*SAeo*Rm5Ceo*RGeo*Rm5Ceo*RAeo | 1817) |
| WV-1674 | m5Ceo*Rm5Ceo*RGeo*RTeo*RAeo*RG*Sm5C*Sm5C*Sm5C*ST*ST*Sm5C*RA*SG* | (SEQ ID NO: |
| | Sm5C*SAeo*Rm5Ceo*RGeo*Rm5Ceo*RAeo | 1818) |

In some embodiments, * only represents a stereorandom phosphorothioate linkage; *S represents an Sp phosphorothioate linkage; *R represents an Rp phosphorothioate linkage; all non-labeled linkage is a natural phosphate linkage; m preceding a base represents 2′-OMe (e.g., mC is 2′-OMe C); eo following a base represents 2′-MOE (e.g., Geo is 2′-MOE); m5m preceding a base represents a 2′-OMe and 5′-methylation (e.g., m5mC is 2′-OMe 5-methyl C); m5Ceo is 2′-MOE m5C.

[1769] Other oligonucleotides used herein include reference and control oligonucleotides:

ODN 1826 (SMAD7 series)
(SEQ ID NO: 1819)
5′-TCCATGACGTTCCTGACGTT-3′
ODN 1826c (negative control)
(SEQ ID NO: 1820)
5′-TCCATGAGCTTCCTGAGCTT-3′
ODN2006
(SEQ ID NO: 2)
5′-TCGTCGTTTTGTCGTTTTGTCGTT-3′
ODN2006c (negative control)
(SEQ ID NO: 1821)
5′-TGCTGCTTTTGTGCTTTTGTGCTT-3′
SOD1
(SEQ ID NO: 1696)
5′-CCGTCGCCCTTCAGCACGCA-3′

Many tested oligonucleotides were stereopure (or mostly stereopure) or chirally controlled CpG oligonucleotide compositions, but reference oligonucleotides ODN 1826, ODN 1826c, ODN2006, ODN2006 and SOD1 are all stereomixtures or stereorandom CpG oligonucleotide compositions. Each of ODN 1826, ODN 1826c, ODN2006, ODN2006 and SOD1 has all phosphorothioates as internucleoside linkages (no phosphodiesters).
ODN2006c is a negative control of ODN2006, wherein the sequences CpG were swapped with GpC (which is generally not immunogenic). Similarly, ODN1826c is a negative control version of ODN1826, in which CpG is again replaced by GpC.

[1770] The large number of CpG oligonucleotides tested allows certain general conclusions to be made. The present disclosure notes, however, that it is not bound by any particular theory or point of conjecture.

[1771] The present disclosure notes that many different CpG oligonucleotides were found to be effective at agonizing an immune response. These differ in CpG region motif, wherein the CpG region motif is defined at least partially by the chirality of the phosphorothioate linkages.

[1772] Various CpG region motifs are listed in Table 1. These include both CpG region motifs of agonistic and antagonistic CpG oligonucleotides.

### Agonistic CpG Oligonucleotides Comprising a Strand Comprising a CpG Region Motif

[1773] In some embodiments, a CpG oligonucleotide can be determined to be agonistic or antagonistic based on a measurement of a change in secretion of a cytokine, e.g., interferon-alpha, interferon-gamma, IL-4, IL-6, IL-8, IL-10, IL-12, TNF-alpha, etc.

[1774] As a non-limiting example, in several figures in the present disclosure, agonistic activity of CpG oligonucleotides was measured as an increase in NF-κβ activity. In a non-limiting example, in several figures, agonistic activity of CpG oligonucleotides was measured by secretion of inflammatory cytokines (IL-6 and MIP-1p). As a non-limiting example, in several figures in the present disclosure, antagonistic activity of CpG oligonucleotides was measured as a decrease in NF-κβ activity (in competition with a TLR9 agonist).

[1775] In some embodiments, an agonistic CpG oligonucleotide is capable of mediating at least a 10% increase in a cytokine in vitro (relative to the absence of the oligonucleotide). In some embodiments, an agonistic CpG oligonucleotide is capable of mediating at least a 20% increase in a cytokine in vitro in human cells. In some embodiments, an agonistic CpG oligonucleotide is capable of mediating at least a 30% increase in a cytokine in vitro in human cells. In some embodiments, an agonistic CpG oligonucleotide is capable of mediating at least a 40% increase in a cytokine in vitro in human cells. In some embodiments, an agonistic CpG oligonucleotide is capable of mediating at least a 50% increase in a cytokine in vitro in human cells. In some embodiments, an agonistic CpG oligonucleotide is capable of mediating at least a 60% increase in a cytokine in vitro in human cells. In some embodiments, an agonistic CpG oligonucleotide is capable of mediating at least a 70% increase in a cytokine in vitro in human cells. In some embodiments, an agonistic CpG oligonucleotide is capable of mediating at least a 80% increase in a cytokine in vitro in human cells. In some embodiments, an agonistic CpG oligonucleotide is capable of mediating at least a 90% increase in a cytokine in vitro in human cells. In some embodiments, an agonistic CpG oligonucleotide is capable of mediating at least a 100% increase in a cytokine in vitro in human cells. In some embodiments, an agonistic CpG oligonucleotide is capable of mediating at least a 110% increase in a cytokine in vitro (relative to the absence of the oligonucleotide). In some embodiments, an agonistic CpG oligonucleotide is capable of mediating at least a 120% increase in a cytokine in vitro in human cells. In some embodiments, an agonistic CpG oligonucleotide is capable of mediating at least a 130% increase in a cytokine in vitro in human cells. In some embodiments, an agonistic CpG oligonucleotide is capable of mediating at least a 140% increase in a cytokine in vitro in human cells. In some embodiments, an agonistic CpG oligonucleotide is capable of mediating at least a 150% increase in a cytokine in vitro in human cells. In some embodiments, an agonistic CpG oligonucleotide is capable of mediating at least a 160% increase in a cytokine in vitro in human cells. In some embodiments, an agonistic CpG oligonucleotide is capable of mediating at least a 170% increase in a cytokine in vitro in human cells. In some embodiments, an agonistic CpG oligonucleotide is capable of mediating at least a 180% increase in a cytokine in vitro in human cells. In some embodiments, an agonistic CpG oligonucleotide is capable of mediating at least a 190% increase in a cytokine in vitro in human cells. In some embodiments, an agonistic CpG oligonucleotide is capable of mediating at least a 200% increase in a cytokine in vitro in human cells.

[1776] In some embodiments, an agonistic CpG oligonucleotide is capable of mediating at least a 10% increase in NF-κβ activity in vitro (relative to the absence of the oligonucleotide). In some embodiments, an agonistic CpG oligonucleotide is capable of mediating at least a 20% increase in NF-κβ activity in vitro in human cells. In some embodiments, an agonistic CpG oligonucleotide is capable of mediating at least a 30% increase in NF-κβ activity in vitro in human cells. In some embodiments, an agonistic CpG oligonucleotide is capable of mediating at least a 40% increase in NF-κβ activity in vitro in human cells. In some embodiments, an agonistic CpG oligonucleotide is capable of mediating at least a 50% increase in NF-κβ activity in vitro in human cells. In some embodiments, an agonistic CpG oligonucleotide is capable of mediating at least a 60% increase in NF-κβ activity in vitro in human cells. In some embodiments, an agonistic CpG oligonucleotide is capable of mediating at least a 70% increase in NF-κβ activity in vitro in human cells. In some embodiments, an agonistic CpG oligonucleotide is capable of mediating at least a 80% increase in NF-κβ activity in vitro in human cells. In some embodiments, an agonistic CpG oligonucleotide is capable of mediating at least a 90% increase in NF-κβ activity in vitro in human cells. In some embodiments, an agonistic CpG oligonucleotide is capable of mediating at least a 100% increase in NF-κβ activity in vitro in human cells. In some embodiments, an agonistic CpG oligonucleotide is capable of mediating at least a 110% increase in NF-κβ activity in vitro (relative to the absence of the oligonucleotide). In some embodiments, an agonistic CpG oligonucleotide is capable of mediating at least a 120% increase in NF-κβ activity in vitro in human cells. In some embodiments, an agonistic CpG oligonucleotide is capable of mediating at least a 130% increase in NF-κβ activity in vitro in human cells. In some embodiments, an agonistic CpG oligonucleotide is capable of mediating at least a 140% increase in NF-κβ activity in vitro in human cells. In some embodiments, an agonistic CpG oligonucleotide is capable of mediating at least a 150% increase in NF-κβ activity in vitro in human cells. In some embodiments, an agonistic CpG oligonucleotide is capable of mediating at least a 160% increase in NF-κβ activity in vitro in human cells. In some embodiments, an agonistic CpG oligonucleotide is capable of mediating at least a 170% increase in NF-κβ activity in vitro in human cells. In some embodiments, an agonistic CpG oligonucleotide is capable of mediating at least a 180% increase in NF-κβ activity in vitro in human cells. In some embodiments, an agonistic CpG oligonucleotide is capable of mediating at least a 190% increase in NF-κβ activity in vitro in human cells. In some embodiments, an agonistic CpG oligonucleotide is capable of mediating at least a 200% increase in NF-κβ activity in vitro in human cells.

[1777] In some embodiments, an antagonistic CpG oligonucleotide is capable of mediating at least a 10% decrease in a cytokine in vitro (relative to the absence of the oligonucleotide). In some embodiments, an antagonistic CpG oligonucleotide is capable of mediating at least a 20% decrease in a cytokine in vitro in human cells. In some embodiments, an antagonistic CpG oligonucleotide is capable of mediating at least a 30% decrease in a cytokine in vitro in human cells. In some embodiments, an antagonistic CpG oligonucleotide is capable of mediating at least a 40% decrease in a cytokine in vitro in human cells. In some embodiments, an antagonistic CpG oligonucleotide is capable of mediating at least a 50% decrease in a cytokine in vitro in human cells. In some embodiments, an antagonistic CpG oligonucleotide is capable of mediating at least a 60% decrease in a cytokine in vitro in human cells. In some embodiments, an antagonistic CpG oligonucleotide is capable of mediating at least a 70% decrease in a cytokine in vitro in human cells. In some embodiments, an antagonistic CpG oligonucleotide is capable of mediating at least a 80% decrease in a cytokine in vitro in human cells. In some embodiments, an antagonistic CpG oligonucleotide is capable of mediating at least a 90% decrease in a cytokine in vitro in human cells. In some embodiments, an antagonistic CpG oligonucleotide is capable of mediating at least a 100% decrease in a cytokine in vitro in human cells.

[1778] In some embodiments, an antagonistic CpG oligonucleotide is capable of mediating at least a 10% decrease in NF-κβ activity in vitro (relative to the absence of the oligonucleotide). In some embodiments, an antagonistic CpG oligonucleotide is capable of mediating at least a 20% decrease in NF-κβ activity in vitro in human cells. In some embodiments, an antagonistic CpG oligonucleotide is capable of mediating at least a 30% decrease in NF-κβ activity in vitro in human cells. In some embodiments, an antagonistic CpG oligonucleotide is capable of mediating at least a 40% decrease in NF-κβ activity in vitro in human cells. In some embodiments, an antagonistic CpG oligonucleotide is capable of mediating at least a 50% decrease in NF-κβ activity in vitro in human cells. In some embodiments, an antagonistic CpG oligonucleotide is capable of mediating at least a 60% decrease in NF-κβ activity in vitro in human cells. In some embodiments, an antagonistic CpG oligonucleotide is capable of mediating at least a 70% decrease in NF-κβ activity in vitro in human cells. In some embodiments, an antagonistic CpG oligonucleotide is capable of mediating at least a 80% decrease in NF-κβ activity in vitro in human cells. In some embodiments, an antagonistic CpG oligonucleotide is capable of mediating at least a 90% decrease in NF-Kp activity in vitro in human cells. In some embodiments, an antagonistic CpG oligonucleotide is capable of mediating at least a 100% decrease in NF-κβ activity in vitro in human cells.

[1779] Any method known in the art can be used to determine if a CpG oligonucleotide is agonistic or antagonistic (or neither).

[1780] In some embodiments, the present disclosure provides methods for assaying TLR9 agonist or antagonist activities, comprising providing a provided chirally controlled oligonucleotide composition described herein. In some embodiments, the present disclosure provides assay systems for assaying TLR9 agonist or antagonist activities, comprising providing a provided chirally controlled oligonucleotide composition.

### CpG Oligonucleotides Comprising a Strand Comprising a CpG Region Motif: All Rp

[1781] One design of PS chirality in a CpG region motif is that all the PS are of the same chirality; thus, they are either all Rp or all Sp. Many CpG oligonucleotides were constructed and tested wherein all the PS in the CpG region motif were either all Rp or Sp. For example, CpG oligonucleotide WV-1701 was effective at agonizing an immune response in human cells (FIG. 7). Without wishing to be bound to any particular theory, the present disclosure notes that the finding that some CpG oligos were effective and some were not if the entire CpG region motif was Rp is consistent with the idea that both the base sequence and the sequence of PS chirality may be relevant for effecting agonism. Efficacious CpG oligonucleotide WV-1701 comprises the agonistic CpG region motif of T-(*R)-C-(*R)-*G-(*R)-T. In some embodiments, CpG oligonucleotides which comprise only 1 copy of a CpG motif are capable of agonizing an immune response

[1782] In some embodiments, the present disclosure provides:

A chirally controlled CpG oligonucleotide composition comprising a CpG oligonucleotide comprising a strand comprising at least one copy of the CpG region motif T-(*R)-C-(*R)-*G-(*R)-T.
A chirally controlled CpG oligonucleotide composition comprising a CpG oligonucleotide comprising a strand comprising at least two copies of the CpG region motif T-(*R)-C-(*R)-*G-(*R)-T.
A chirally controlled CpG oligonucleotide composition comprising a CpG oligonucleotide comprising a strand comprising at least three copies of the CpG region motif T-(*R)-C-(*R)-*G-(*R)-T.
A chirally controlled CpG oligonucleotide composition comprising a CpG oligonucleotide comprising a strand comprising at least four copies of the CpG region motif T-(*R)-C-(*R)-*G-(*R)-T.
The CpG region motif of WV-1701 could also be described as four copies of T-(*R)-C-(*R)-G-(*R)-T-(*R)-Py, wherein Py is a pyrimidine.

[1783] In some embodiments, the present disclosure has also shown that many CpG oligonucleotides which comprise only 1 copy of a CpG motif are capable of agonizing an immune response.

[1784] In some embodiments, the present disclosure provides:

A chirally controlled CpG oligonucleotide composition comprising a CpG oligonucleotide comprising a strand comprising at least one copy of the CpG region motif T-(*R)-C-(*R)-G-(*R)-T-(*R)-Py.
A chirally controlled CpG oligonucleotide composition comprising a CpG oligonucleotide comprising a strand comprising at least two copies of the CpG region motif T-(*R)-C-(*R)-G-(*R)-T-(*R)-Py.
A chirally controlled CpG oligonucleotide composition comprising a CpG oligonucleotide comprising a strand comprising at least three copies of the CpG region motif T-(*R)-C-(*R)-G-(*R)-T-(*R)-Py.
A chirally controlled CpG oligonucleotide composition comprising a CpG oligonucleotide comprising a strand comprising at least four copies of the CpG region motif T-(*R)-C-(*R)-G-(*R)-T-(*R)-Py.

[1785] In various embodiments, the CpG oligonucleotide is capable of agonizing an immune response in human cells. In various embodiments, C is unmethylated C. In various embodiments, at least one nucleoside is 2′H (DNA). In various embodiments, each nucleoside is 2′H (DNA). In various embodiments, the CpG oligonucleotide is between 15 and 49 nt in length. In various embodiments, the CpG oligonucleotide is capable of agonizing an immune response in human cells, and/or C is unmethylated C, and/or at least one nucleoside is 2′H (DNA), and/or each nucleoside is 2′H (DNA), and/or the CpG oligonucleotide is between 15 and 49 nt in length.

[1786] WV-1701, which agonizes an immune response in the human (see FIG. 7) also has the format of comprising at least two CpG region motifs of N₁-(*R)-C-(*R)-G-(*R)-N₂, and comprises at least one phosphorothioate in the Sp conformation between the CpG region motifs.

[1787] In some embodiments, the present disclosure provides: A chirally controlled CpG oligonucleotide composition comprising a CpG oligonucleotide comprising a strand comprising at least two non-adjacent copies of the CpG region motif of N₁-(*R)-C-(*R)-G-(*R)-N₂, wherein at least one phosphorothioate between the CpG region motifs is in the Sp conformation. In various embodiments, at least one nucleoside is 2′H (DNA). In various embodiments, each nucleoside is 2′H (DNA). In various embodiments, the CpG oligonucleotide is between 15 and 49 nt in length. In various embodiments, the CpG oligonucleotide is capable of agonizing an immune response in human cells, and/or C is unmethylated C, and/or at least one nucleoside is 2′H (DNA), and/or each nucleoside is 2′H (DNA), and/or the CpG oligonucleotide is between 15 and 49 nt in length.

[1788] CpG oligonucleotides comprising a strand comprising a CpG region motif: All Sp

[1789] Many CpG oligonucleotides were constructed and tested wherein all the PS in the CpG region motif were all Sp. CpG oligonucleotide WV-1694 was effective at agonizing an immune response in human cells (FIG. 7). In some embodiments, the present disclosure provides:

A chirally controlled CpG oligonucleotide composition comprising a CpG oligonucleotide comprising a strand comprising the agonistic CpG region motif T-(*S)-C-(*S)-G-(*S)-T-(*S)-T.
A chirally controlled CpG oligonucleotide composition comprising a CpG oligonucleotide comprising a strand comprising at least one copy of the CpG region motif T-(*S)-C-(*S)-G-(*S)-T-(*S)-T.
A chirally controlled CpG oligonucleotide composition comprising a CpG oligonucleotide comprising a strand comprising at least two copies of the CpG region motif T-(*S)-C-(*S)-G-(*S)-T-(*S)-T.
A chirally controlled CpG oligonucleotide composition comprising a CpG oligonucleotide comprising a strand comprising at least three copies of the CpG region motif T-(*S)-C-(*S)-G-(*S)-T-(*S)-T.
A chirally controlled CpG oligonucleotide composition comprising a CpG oligonucleotide comprising a strand comprising at least four copies of the CpG region motif T-(*S)-C-(*S)-G-(*S)-T-(*S)-T.

[1790] In various embodiments, a chirally controlled CpG oligonucleotide composition comprising a CpG oligonucleotide is capable of agonizing an immune response in human cells. In various embodiments, C is unmethylated C. In various embodiments, at least one nucleoside is 2′H (DNA). In various embodiments, each nucleoside is 2′H (DNA). In various embodiments, the CpG oligonucleotide is between 15 and 49 nt in length. In various embodiments, the CpG oligonucleotide is capable of agonizing an immune response in human cells, and/or C is unmethylated C, and/or at least one nucleoside is 2′H (DNA), and/or each nucleoside is 2′H (DNA), and/or the CpG oligonucleotide is between 15 and 49 nt in length.

### Agonistic CpG Region Motifs Comprising a Mixture of Rp and Sp

[1791] Many CpG oligonucleotides were constructed and tested wherein the PS in the CpG region motif were a mixture of Rp and Sp. Several CpG oligonucleotides are shown herein to be capable of mediating agonism in human cells, including: WV-1698, WV-1696, WV-1695, WV-1699, WV-1700, WV-1697 all mediated agonism in the human (see FIG. 7).

[1792] In some embodiments, various CpG oligonucleotides comprise a CpG region motif of:
[1793] N₁-(*R/S)-C-(*R/S)-G-(*R/S)-N₂
[1794] N₁-(*R/S)-C-(*R/S)-G-(*R/S)-N₂, wherein at least one *R/S is *R and at least one *R/S is *S
[1795] N₁-(*R/S)-C-(*R/S)-G-(*R/S)-N₂, wherein at least one *R/S is *R and at least one *R/S is *S, and wherein C is unmethylated
[1796] N₁-(*R)-C-(*R)-G-(*S)-N₂
[1797] N₁-(*R)-C-(*S)-G-(*S)-N₂
[1798] N₁-(*R)-C-(*S)-G-(*R)-N₂
[1799] N₁-(*S)-C-(*R)-G-(*S)-N₂
[1800] N₁-(*S)-C-(*R)-G-(*R)-N₂
[1801] N₁-(*S)-C-(*S)-G-(*R)-N₂
[1802] Py-(*R/S)-C-(*R/S)-G-(*R/S)-Py, wherein at least one *R/S is *R and at least one *R/S is *S, and wherein C is unmethylated
[1803] N₁-(*R/S)-C-(*R/S)-G-(*R)-N₂
[1804] N₁-(*R/S)-C-(*R/S)-G-(*S)-N₂

[1805] In some embodiments, the present disclosure provides:

[1806] A chirally controlled CpG oligonucleotide composition comprising a CpG oligonucleotide comprising a strand comprising at least one copy of the CpG region motif N₁-(*R/S)-C-(*R/S)-G-(*R/S)-N₂.

A chirally controlled CpG oligonucleotide composition comprising a CpG oligonucleotide comprising a strand comprising at least two copies of the CpG region motif N₁-(*R/S)-C-(*R/S)-G-(*R/S)-N₂.
A chirally controlled CpG oligonucleotide composition comprising a CpG oligonucleotide comprising a strand comprising at least three copies of the CpG region motif N₁-(*R/S)-C-(*R/S)-G-(*R/S)-N₂.
A chirally controlled CpG oligonucleotide composition comprising a CpG oligonucleotide comprising a strand comprising at least four copies of the CpG region motif N₁-(*R/S)-C-(*R/S)-G-(*R/S)-N₂.
A chirally controlled CpG oligonucleotide composition comprising a CpG oligonucleotide comprising a strand comprising at least one copy of the CpG region motif N₁-(*R/S)-C-(*R/S)-G-(*R/S)-N₂, wherein at least one *R/S is *R and at least one *R/S is *S.
A chirally controlled CpG oligonucleotide composition comprising a CpG oligonucleotide comprising a strand comprising at least two copies of the CpG region motif N₁-(*R/S)-C-(*R/S)-G-(*R/S)-N₂, wherein at least one *R/S is *R and at least one *R/S is *S.
A chirally controlled CpG oligonucleotide composition comprising a CpG oligonucleotide comprising a strand comprising at least three copies of the CpG region motif N₁-(*R/S)-C-(*R/S)-G-(*R/S)-N₂, wherein at least one *R/S is *R and at least one *R/S is *S.
A chirally controlled CpG oligonucleotide composition comprising a CpG oligonucleotide comprising a strand comprising at least four copies of the CpG region motif N₁-(*R/S)-C-(*R/S)-G-(*R/S)-N₂, wherein at least one *R/S is *R and at least one *R/S is *S.
A chirally controlled CpG oligonucleotide composition comprising a CpG oligonucleotide comprising a strand comprising at least one copy of the CpG region motif N₁-(*R/S)-C-(*R/S)-G-(*R/S)-N₂, wherein at least one *R/S is *R and at least one *R/S is *S, and wherein C is unmethylated.
A chirally controlled CpG oligonucleotide composition comprising a CpG oligonucleotide comprising a strand comprising at least two copies of the CpG region motif N₁-(*R/S)-C-(*R/S)-G-(*R/S)-N₂, wherein at least one *R/S is *R and at least one *R/S is *S, and wherein C is unmethylated.
A chirally controlled CpG oligonucleotide composition comprising a CpG oligonucleotide comprising a strand comprising at least three copies of the CpG region motif N₁-(*R/S)-C-(*R/S)-G-(*R/S)-N₂, wherein at least one *R/S is *R and at least one *R/S is *S, and wherein C is unmethylated.
A chirally controlled CpG oligonucleotide composition comprising a CpG oligonucleotide comprising a strand comprising at least four copies of the CpG region motif N₁-(*R/S)-C-(*R/S)-G-(*R/S)-N₂, wherein at least one *R/S is *R and at least one *R/S is *S, and wherein C is unmethylated.
A chirally controlled CpG oligonucleotide composition comprising a CpG oligonucleotide comprising a strand comprising at least one copy of the CpG region motif N₁-(*R)-C-(*R)-G-(*S)-N₂.
A chirally controlled CpG oligonucleotide composition comprising a CpG oligonucleotide comprising a strand comprising at least two copies of the CpG region motif N₁-(*R)-C-(*R)-G-(*S)-N₂.
A chirally controlled CpG oligonucleotide composition comprising a CpG oligonucleotide comprising a strand comprising at least three copies of the CpG region motif N₁-(*R)-C-(*R)-G-(*S)-N₂.
A chirally controlled CpG oligonucleotide composition comprising a CpG oligonucleotide comprising a strand comprising at least four copies of the CpG region motif N₁-(*R)-C-(*R)-G-(*S)-N₂.
A chirally controlled CpG oligonucleotide composition comprising a CpG oligonucleotide comprising a strand comprising at least one copy of the CpG region motif N₁-(*R)-C-(*S)-G-(*S)-N₂.
A chirally controlled CpG oligonucleotide composition comprising a CpG oligonucleotide comprising a strand comprising at least two copies of the CpG region motif N₁-(*R)-C-(*S)-G-(*S)-N₂.
A chirally controlled CpG oligonucleotide composition comprising a CpG oligonucleotide comprising a strand comprising at least three copies of the CpG region motif N₁-(*R)-C-(*S)-G-(*S)-N₂.
A chirally controlled CpG oligonucleotide composition comprising a CpG oligonucleotide comprising a strand comprising at least four copies of the CpG region motif N₁-(*R)-C-(*S)-G-(*S)-N₂.
A chirally controlled CpG oligonucleotide composition comprising a CpG oligonucleotide comprising a strand comprising at least one copy of the CpG region motif N₁-(*R)-C-(*S)-G-(*R)-N₂.
A chirally controlled CpG oligonucleotide composition comprising a CpG oligonucleotide comprising a strand comprising at least two copies of the CpG region motif N₁-(*R)-C-(*S)-G-(*R)-N₂.
A chirally controlled CpG oligonucleotide composition comprising a CpG oligonucleotide comprising a strand comprising at least three copies of the CpG region motif N₁-(*R)-C-(*S)-G-(*R)-N₂.
A chirally controlled CpG oligonucleotide composition comprising a CpG oligonucleotide comprising a strand comprising at least four copies of the CpG region motif N₁-(*R)-C-(*S)-G-(*R)-N₂.
A chirally controlled CpG oligonucleotide composition comprising a CpG oligonucleotide comprising a strand comprising at least one copy of the CpG region motif N₁-(*S)-C-(*R)-G-(*S)-N₂.
A chirally controlled CpG oligonucleotide composition comprising a CpG oligonucleotide comprising a strand comprising at least two copies of the CpG region motif N₁-(*S)-C-(*R)-G-(*S)-N₂.
A chirally controlled CpG oligonucleotide composition comprising a CpG oligonucleotide comprising a strand comprising at least three copies of the CpG region motif N₁-(*S)-C-(*R)-G-(*S)-N₂.
A chirally controlled CpG oligonucleotide composition comprising a CpG oligonucleotide comprising a strand comprising at least four copies of the CpG region motif N₁-(*S)-C-(*R)-G-(*S)-N₂.
A chirally controlled CpG oligonucleotide composition comprising a CpG oligonucleotide comprising a strand comprising at least one copy of the CpG region motif N₁-(*S)-C-(*R)-G-(*R)-N₂.
A chirally controlled CpG oligonucleotide composition comprising a CpG oligonucleotide comprising a strand comprising at least two copies of the CpG region motif N₁-(*S)-C-(*R)-G-(*R)-N₂.
A chirally controlled CpG oligonucleotide composition comprising a CpG oligonucleotide comprising a strand comprising at least three copies of the CpG region motif N₁-(*S)-C-(*R)-G-(*R)-N₂.
A chirally controlled CpG oligonucleotide composition comprising a CpG oligonucleotide comprising a strand comprising at least four copies of the CpG region motif N₁-(*S)-C-(*R)-G-(*R)-N₂.
A chirally controlled CpG oligonucleotide composition comprising a CpG oligonucleotide comprising a strand comprising at least one copy of the CpG region motif N₁-(*S)-C-(*S)-G-(*R)-N₂.
A chirally controlled CpG oligonucleotide composition comprising a CpG oligonucleotide comprising a strand comprising at least two copies of the CpG region motif N₁-(*S)-C-(*S)-G-(*R)-N₂.
A chirally controlled CpG oligonucleotide composition comprising a CpG oligonucleotide comprising a strand comprising at least three copies of the CpG region motif N₁-(*S)-C-(*S)-G-(*R)-N₂.
A chirally controlled CpG oligonucleotide composition comprising a CpG oligonucleotide comprising a strand comprising at least four copies of the CpG region motif N₁-(*S)-C-(*S)-G-(*R)-N₂.
A chirally controlled CpG oligonucleotide composition comprising a CpG oligonucleotide comprising a strand comprising at least one copy of the CpG region motif Py-(*R/S)-C-(*R/S)-G-(*R/S)-Py, wherein at least one *R/S is *R and at least one *R/S is *S, and wherein C is unmethylated.
A chirally controlled CpG oligonucleotide composition comprising a CpG oligonucleotide comprising a strand comprising at least two copies of the CpG region motif Py-(*R/S)-C-(*R/S)-G-(*R/S)-Py, wherein at least one *R/S is *R and at least one *R/S is *S, and wherein C is unmethylated.
A chirally controlled CpG oligonucleotide composition comprising a CpG oligonucleotide comprising a strand comprising at least three copies of the CpG region motif Py-(*R/S)-C-(*R/S)-G-(*R/S)-Py, wherein at least one *R/S is *R and at least one *R/S is *S, and wherein C is unmethylated.
A chirally controlled CpG oligonucleotide composition comprising a CpG oligonucleotide comprising a strand comprising at least four copies of the CpG region motif Py-(*R/S)-C-(*R/S)-G-(*R/S)-Py, wherein at least one *R/S is *R and at least one *R/S is *S, and wherein C is unmethylated.
A chirally controlled CpG oligonucleotide composition comprising a CpG oligonucleotide comprising a strand comprising at least one copy of the CpG region motif N₁-(*R/S)-C-(*R/S)-G-(*R)-N₂.
A chirally controlled CpG oligonucleotide composition comprising a CpG oligonucleotide comprising a strand comprising at least two copies of the CpG region motif N₁-(*R/S)-C-(*R/S)-G-(*R)-N₂.
A chirally controlled CpG oligonucleotide composition comprising a CpG oligonucleotide comprising a strand comprising at least three copies of the CpG region motif N₁-(*R/S)-C-(*R/S)-G-(*R)-N₂.
A chirally controlled CpG oligonucleotide composition comprising a CpG oligonucleotide comprising a strand comprising at least four copies of the CpG region motif N₁-(*R/S)-C-(*R/S)-G-(*R)-N₂.
A chirally controlled CpG oligonucleotide composition comprising a CpG oligonucleotide comprising a strand comprising at least one copy of the CpG region motif N₁-(*R/S)-C-(*R/S)-G-(*S)-N₂.
A chirally controlled CpG oligonucleotide composition comprising a CpG oligonucleotide comprising a strand comprising at least two copies of the CpG region motif N₁-(*R/S)-C-(*R/S)-G-(*S)-N₂.
A chirally controlled CpG oligonucleotide composition comprising a CpG oligonucleotide comprising a strand comprising at least three copies of the CpG region motif N₁-(*R/S)-C-(*R/S)-G-(*S)-N₂.
A chirally controlled CpG oligonucleotide composition comprising a CpG oligonucleotide comprising a strand comprising at least four copies of the CpG region motif N₁-(*R/S)-C-(*R/S)-G-(*S)-N₂.

[1807] In various embodiments, a chirally controlled CpG oligonucleotide composition comprising a CpG oligonucleotide is capable of agonizing an immune response in human cells. In various embodiments, C is unmethylated C. In various embodiments, at least one nucleoside is 2′H (DNA). In various embodiments, each nucleoside is 2′H (DNA). In various embodiments, the CpG oligonucleotide is between 15 and 49 nt in length. In various embodiments, the CpG oligonucleotide is capable of agonizing an immune response in human cells, and/or C is unmethylated C, and/or at least one nucleoside is 2′H (DNA), and/or each nucleoside is 2′H (DNA), and/or the CpG oligonucleotide is between 15 and 49 nt in length.

### Agonistic CpG Region Motifs Comprising m5C (5-Methyl C)

[1808] As noted above, DNA comprising unmethylated CpG motifs (e.g., bacterial, viral and mitochondrial DNA) generally mediated immune responses, while DNA comprising methylated CpG motifs (e.g., mammalian nuclear DNA) generally do not. For example, in B-type CpG oligonucleotides, in principle, modification of cytosine is usually not well tolerated. Vollmer et al. 2009 Adv. Drug Del. Rev. 61: 195-204.

[1809] The present disclosure showed that, surprisingly, some CpG oligonucleotides were agonistic, which comprise a CpG region motif comprising a methylated C (m5C or 5-Methyl C) and various chirally controlled phosphorothioates.

[1810] Several CpG oligonucleotides comprising a CpG region motif comprising a m5C are shown herein to be capable of mediating agonism in human cells, including: WV-1490, WV-488, WV-1672, WV-1491, and WV-1489 (See FIGS. 14 and 15).

[1811] In some embodiments, various CpG oligonucleotides comprise a CpG region motif of:

m5C-(*R)-m5C-(*R)-G-(*R)-N₁, where all the nucleosides are 2′-MOE.
m5C-(*R)-m5C-(*R)-G-(*R)-Py, where all the nucleosides are 2′-MOE.
N₁-(*R)-m5C-(*R)-G-(*R)-N₂, wherein N₁ is methylated or not methylated, and all the nucleosides are 2′-MOE.
N₁-(*R)-m5C-(*R)-G-(*R)-Py, wherein N₁ is methylated or not methylated, and all the nucleosides are 2′-MOE.
N₁-(*R/S)-m5C-(*R/S)-G-(*R/S)-N₂, wherein at least 2 of the *R/S are *R, all the nucleosides are 2′-MOE, and N₁ and N₂ are methylated or not methylated.
N₁-(*R)-m5C-(*R/S)-G-(*R)-N₂, wherein at least 2 of the *R/S are *R, all the nucleosides are 2′-MOE, and N₁ and N₂ are methylated or not methylated.

[1812] In some embodiments, the present disclosure provides:

A chirally controlled CpG oligonucleotide composition comprising a CpG oligonucleotide comprising a strand comprising at least one copy of the CpG region motif m5C-(*R)-m5C-(*R)-G-(*R)-N₁, where all the nucleosides are 2′-MOE.
A chirally controlled CpG oligonucleotide composition comprising a CpG oligonucleotide comprising a strand comprising at least two copies of the CpG region motif m5C-(*R)-m5C-(*R)-G-(*R)-N₁, where all the nucleosides are 2′-MOE.
A chirally controlled CpG oligonucleotide composition comprising a CpG oligonucleotide comprising a strand comprising at least three copies of the CpG region motif m5C-(*R)-m5C-(*R)-G-(*R)-N₁, where all the nucleosides are 2′-MOE.
A chirally controlled CpG oligonucleotide composition comprising a CpG oligonucleotide comprising a strand comprising at least four copies of the CpG region motif m5C-(*R)-m5C-(*R)-G-(*R)-N₁, where all the nucleosides are 2′-MOE.
A chirally controlled CpG oligonucleotide composition comprising a CpG oligonucleotide comprising a strand comprising at least one copy of the CpG region motif m5C-(*R)-m5C-(*R)-G-(*R)-Py, where all the nucleosides are 2′-MOE.
A chirally controlled CpG oligonucleotide composition comprising a CpG oligonucleotide comprising a strand comprising at least two copies of the CpG region motif m5C-(*R)-m5C-(*R)-G-(*R)-Py, where all the nucleosides are 2′-MOE.
A chirally controlled CpG oligonucleotide composition comprising a CpG oligonucleotide comprising a strand comprising at least three copies of the CpG region motif m5C-(*R)-m5C-(*R)-G-(*R)-Py, where all the nucleosides are 2′-MOE.
A chirally controlled CpG oligonucleotide composition comprising a CpG oligonucleotide comprising a strand comprising at least four copies of the CpG region motif m5C-(*R)-m5C-(*R)-G-(*R)-Py, where all the nucleosides are 2′-MOE.
A chirally controlled CpG oligonucleotide composition comprising a CpG oligonucleotide comprising a strand comprising at least one copy of the CpG region motif N₁-(*R)-m5C-(*R)-G-(*R)-N₂, wherein N₁ is methylated or not methylated, and all the nucleosides are 2′-MOE.
A chirally controlled CpG oligonucleotide composition comprising a CpG oligonucleotide comprising a strand comprising at least two copies of the CpG region motif N₁-(*R)-m5C-(*R)-G-(*R)-N₂, wherein N₁ is methylated or not methylated, and all the nucleosides are 2′-MOE.
A chirally controlled CpG oligonucleotide composition comprising a CpG oligonucleotide comprising a strand comprising at least three copies of the CpG region motif N₁-(*R)-m5C-(*R)-G-(*R)-N₂, wherein N₁ is methylated or not methylated, and all the nucleosides are 2′-MOE.
A chirally controlled CpG oligonucleotide composition comprising a CpG oligonucleotide comprising a strand comprising at least four copies of the CpG region motif N₁-(*R)-m5C-(*R)-G-(*R)-N₂, wherein N₁ is methylated or not methylated, and all the nucleosides are 2′-MOE.
A chirally controlled CpG oligonucleotide composition comprising a CpG oligonucleotide comprising a strand comprising at least one copy of the CpG region motif N₁-(*R)-m5C-(*R)-G-(*R)-Py, wherein N₁ is methylated or not methylated, and all the nucleosides are 2′-MOE.
A chirally controlled CpG oligonucleotide composition comprising a CpG oligonucleotide comprising a strand comprising at least two copies of the CpG region motif N₁-(*R)-m5C-(*R)-G-(*R)-Py, wherein N₁ is methylated or not methylated, and all the nucleosides are 2′-MOE.
A chirally controlled CpG oligonucleotide composition comprising a CpG oligonucleotide comprising a strand comprising at least three copies of the CpG region motif N₁-(*R)-m5C-(*R)-G-(*R)-Py, wherein N₁ is methylated or not methylated, and all the nucleosides are 2′-MOE.
A chirally controlled CpG oligonucleotide composition comprising a CpG oligonucleotide comprising a strand comprising at least four copies of the CpG region motif N₁-(*R)-m5C-(*R)-G-(*R)-Py, wherein N₁ is methylated or not methylated, and all the nucleosides are 2′-MOE.
A chirally controlled CpG oligonucleotide composition comprising a CpG oligonucleotide comprising a strand comprising at least one copy of the CpG region motif N₁-(*R/S)-m5C-(*R/S)-G-(*R/S)-N₂, wherein at least 2 of the *R/S are *R, all the nucleosides are 2′-MOE, and N₁ and N₂ are methylated or not methylated.
A chirally controlled CpG oligonucleotide composition comprising a CpG oligonucleotide comprising a strand comprising at least two copies of the CpG region motif N₁-(*R/S)-m5C-(*R/S)-G-(*R/S)-N₂, wherein at least 2 of the *R/S are *R, all the nucleosides are 2′-MOE, and N₁ and N₂ are methylated or not methylated.
A chirally controlled CpG oligonucleotide composition comprising a CpG oligonucleotide comprising a strand comprising at least three copies of the CpG region motif N₁-(*R/S)-m5C-(*R/S)-G-(*R/S)-N₂, wherein at least 2 of the *R/S are *R, all the nucleosides are 2′-MOE, and N₁ and N₂ are methylated or not methylated.
A chirally controlled CpG oligonucleotide composition comprising a CpG oligonucleotide comprising a strand comprising at least four copies of the CpG region motif N₁-(*R/S)-m5C-(*R/S)-G-(*R/S)-N₂, wherein at least 2 of the *R/S are *R, all the nucleosides are 2′-MOE, and N₁ and N₂ are methylated or not methylated.
A chirally controlled CpG oligonucleotide composition comprising a CpG oligonucleotide comprising a strand comprising at least one copy of the CpG region motif N₁-(*R)-m5C-(*R/S)-G-(*R)-N₂, wherein at least 2 of the *R/S are *R, all the nucleosides are 2′-MOE, and N₁ and N₂ are methylated or not methylated.
A chirally controlled CpG oligonucleotide composition comprising a CpG oligonucleotide comprising a strand comprising at least two copies of the CpG region motif N₁-(*R)-m5C-(*R/S)-G-(*R)-N₂, wherein at least 2 of the *R/S are *R, all the nucleosides are 2′-MOE, and N₁ and N₂ are methylated or not methylated.
A chirally controlled CpG oligonucleotide composition comprising a CpG oligonucleotide comprising a strand comprising at least three copies of the CpG region motif N₁-(*R)-m5C-(*R/S)-G-(*R)-N₂, wherein at least 2 of the *R/S are *R, all the nucleosides are 2′-MOE, and N₁ and N₂ are methylated or not methylated.
A chirally controlled CpG oligonucleotide composition comprising a CpG oligonucleotide comprising a strand comprising at least four copies of the CpG region motif N₁-(*R)-m5C-(*R/S)-G-(*R)-N₂, wherein at least 2 of the *R/S are *R, all the nucleosides are 2′-MOE, and N₁ and N₂ are methylated or not methylated.

[1813] In various embodiments, provided chirally controlled CpG oligonucleotide composition comprising a CpG oligonucleotide is capable of agonizing an immune response in human cells. In various embodiments, at least one nucleoside is 2′H (DNA). In various embodiments, the CpG oligonucleotide is between 15 and 49 nt in length. In various embodiments, the CpG oligonucleotide is capable of agonizing an immune response in human cells, and/or C is unmethylated C, and/or at least one nucleoside is 2′H (DNA), and/or the CpG oligonucleotide is between 15 and 49 nt in length.

[1814] Several additional CpG oligonucleotides were tested for agonism, but none activated hTLR9. These CpG oligonucleotides were:

| | | |
|---|---|---|
| ONT- | 5′- Geo*m5Ceo*m5Ceo*Teo*m5Ceo*A*G*T*m5C*T*G*m5C*T*T* | (SEQ ID |
| 41 | m5C*Geo*m5Ceo*Aeo*m5Ceo*m5Ceo -3′ | NO: 1822) |
| ONT- | 5′- | (SEQ ID |
| 75 | Geo*Rm5Ceo*Rm5Ceo*RTeo*Rm5Ceo*RA*RG*RT*Rm5C*RT*RG | NO: 1823) |
| | *Rm5C*RT*RT*Rm5C*RGeo*Rm5Ceo*RAeo*Rm5Ceo*Rm5Ceo-3′ | |
| ONT- | 5′- | (SEQ ID |
| 80 | Geo*Sm5Ceo*Sm5Ceo*STeo*Sm5Ceo*SA*SG*ST*Sm5C*ST*SG*S | NO: 1824) |
| | m5C*ST*ST*Sm5C*SGeo*Sm5Ceo*SAeo*Sm5Ceo*Sm5Ceo-3′ | |
| ONT- | 5′- | (SEQ ID |
| 82 | Geo*RTeo*Rm5Ceo*Rm5Ceo*Rm5Ceo*RT*RG*RA*RA*RG*RA*R | NO: 1825) |
| | T*RG*RT*Rm5C*RAeo*RAeo*RTeo*RGeo*Rm5Ceo-3′ | |
| ONT- | 5′- Geo*Teo*m5Ceo*m5Ceo*m5Ceo*T*G*A*A*G*A*T*G*T*m5C* | (SEQ ID |
| 83 | Aeo*Aeo*Teo*Geo*m5Ceo -3′ | NO: 1826) |
| ONT- | 5′- | (SEQ ID |
| 84 | Geo*STeo*Sm5Ceo*Sm5Ceo*Sm5Ceo*ST*SG*SA*SA*SG*SA*ST* | NO: 1827) |
| | SG*ST*Sm5C*SAeo*SAeo*STeo*SGeo*Sm5Ceo-3′ | |
| ONT- | 5′- | (SEQ ID |
| 85 | Geo*RTeo*Rm5Ceo*Rm5Ceo*Rm5Ceo*RT*SG*SA*SA*SG*SA*ST | NO: 1828) |
| | *SG*ST*Sm5C*SAeo*RAeo*RTeo*RGeo*Rm5Ceo-3′ | |
| ONT- | 5′- | (SEQ ID |
| 86 | Geo*STeo*Sm5Ceo*Sm5Ceo*Sm5Ceo*ST*RG*RA*RA*RG*RA*RT | NO: 1829) |
| | *RG*RT*Rm5C*RAeo*SAeo*STeo*SGeo*Sm5Ceo-3′ | |
| ONT- | 5′- | (SEQ ID |
| 87 | Geo*Rm5Ceo*Rm5Ceo*RTeo*Rm5Ceo*RA*SG*ST*Rm5C*ST*SG* | NO: 1830) |
| | Rm5C*ST*ST*Rm5C*RGeo*Rm5Ceo*RAeo*Rm5Ceo*Rm5Ceo-3′ | |
| ONT- | 5′- | (SEQ ID |
| 88 | Geo*Sm5Ceo*Sm5Ceo*STeo*Sm5Ceo*SA*RG*RT*Sm5C*RT*RG* | NO: 1831) |
| | Sm5C*RT*RT*Sm5C*SGeo*Sm5Ceo*SAeo*Sm5Ceo*Sm5Ceo-3′ | |

### Antagonistic CpG Oligonucleotides Comprising a CpG Region Motif

[1815] While the present disclosure shows that various CpG region motifs are agonistic, the data also indicate that various other CpG region motifs are antagonistic. Several CpG oligonucleotides are shown herein to be capable of mediating antagonism in human cells, including:

### WV-499, WV-1372, WV-1373, WV-1374, WV-1375, WV-1376, WV-1377, WV-1378, WV-1379, WV-1380, WV-1381, WV-1382, WV-1383, WV-1384, WV-1385, WV-1386, WV-1387, WV-1388, WV-1389, WV-1390, WV-1494, WV-1512 (See FIGS. 9 and 13).

[1816] In some embodiments, various CpG oligonucleotides comprise a CpG region motif of:
[1817] N₁-(*R)-[C]-(*R)-[G]-(*R)-N₂, where N₁ is 2′H, 2′-MOE or 2′-OMe; [C] is C, m5C, 2′-MOE C, or 2′-MOE m5C; [G] is optionally G, 2′-Ome G, or 2′-MOE G; and N₂ is 2′H, 2′-MOE or 2′-OMe.
[1818] N₁-(*S)-[C]-(*R)-[G]-(*S)-N₂, where N₁ is 2′H, 2′-MOE or 2′-OMe; [C] is C, m5C, 2′-MOE C, or 2′-MOE m5C; [G] is optionally G, 2′-Ome G, or 2′-MOE G; and N₂ is 2′H, 2′-MOE or 2′-OMe.
[1819] N₁-(*S)-[C]-(*R)-[G]-(*S)-N₂, where N₁ is 2′H; [C] is C, m5C, 2′-MOE C, or 2′-MOE m5C; [G] is optionally G, 2′-Ome G, or 2′-MOE G; and N₂ is 2′H.
[1820] N₁-(*R)-[C]-(*R)-[G]-(*R)-Pyeo, where N₁ and Py are 2′H, 2′-MOE or 2′OMe; and [C] is C or 2′-MOE C; and [G] is G or 2′-MOE G
[1821] N₁-(*R)-[C]-(*R)-[G]-(*R)-Neo, where N₁ and N₂ are 2′H, 2′-MOE or 2′OMe; and [C] is 2′-MOE m5C
[1822] Py-(*R)-C-(*R)-G-(*R)-Py
[1823] Py-(*R)-C-(*R)-G-(*R)-Py
[1824] Py-(*S)-C-(*R)-G-(*S)-Py
[1825] Py-(*S)-C-(*S)-G-(*S)-Py
[1826] Py-(*R)-[C]-(*R)-[G]-(*R)-Py, where [C] is 2′-MOE C; and [G] is 2′-MOE G
[1827] Py-(*R)-[C]-(*R)-[G]-(*S)-Py, where [C] is 2′-MOE C; and [G] is 2′-MOE G
[1828] Py-(*R)-m5C-(*R)-G-(*R)-Py
[1829] Py-(*R)-m5C-(*R)-G-(*R)-Py
[1830] Py-(*R)-[C]-(*R)-[G]-(*R)-N₁, where [C] is 2′-OMe m5C, and [G] is 2′-OMe G, and N₁ is 2′-OMe
[1831] Py-(*R)-[C]-(*R)-[G]-(*R)-Py, where [C] is 2′-OMe m5C, and [G] is 2′-OMe G
[1832] Py-(*R)-[C]-(*R)-[G]-(*R)-Py, where [C] is 2′-OMe C and [G] is 2′-OMe G
[1833] Py-(*S)-[C]-(*R)-[G]-(*S)-Py, where [C] is 2′-MOE C and [G] is 2′-MOE G
[1834] Py-(*S)-[C]-(*R)-G-(*S)-Py
[1835] Py-(*S)-[C]-(*R)-[G]-(*S)-Py, where [C] is 2′-MOE m5C and [G] is 2′-MOE G
[1836] Py-(*S)-[C]-(*R)-[G]-(*S)-Py, where [C] is 2′-OMe m5C and [G] is 2′-OMe G
[1837] Py-(*S)-[C]-(*R)-[G]-(*S)-Py, where [C] is 2′-OMe C and [G] is 2′-OMe G
[1838] Py-(*R)-[C]-(*R)-[G]-(*R)-Py, where both [C] and [G] are 2′-modified or
[1839] N₁-(*R)-[C]-(*R)-[G]-(*R)-N₂, where both [C] and [G] are 2′-modified.

[1840] In some embodiments, the present disclosure pertains to:

A chirally controlled CpG oligonucleotide composition comprising a CpG oligonucleotide comprising a strand comprising at least one copy of the CpG region motif N₁-(*S)-[C]-(*R)-[G]-(*S)-N₂, where N₁ is 2′H, 2′-MOE or 2′-OMe; [C] is C, m5C, 2′-MOE C, or 2′-MOE m5C; [G] is optionally G, 2′-Ome G, or 2′-MOE G; and N₂ is 2′H, 2′-MOE or 2′-OMe.
A chirally controlled CpG oligonucleotide composition comprising a CpG oligonucleotide comprising a strand comprising at least two copies of the CpG region motif N₁-(*S)-[C]-(*R)-[G]-(*S)-N₂, where N₁ is 2′H, 2′-MOE or 2′-OMe; [C] is C, m5C, 2′-MOE C, or 2′-MOE m5C; [G] is optionally G, 2′-Ome G, or 2′-MOE G; and N₂ is 2′H, 2′-MOE or 2′-OMe.
A chirally controlled CpG oligonucleotide composition comprising a CpG oligonucleotide comprising a strand comprising at least three copies of the CpG region motif N₁-(*S)-[C]-(*R)-[G]-(*S)-N₂, where N₁ is 2′H, 2′-MOE or 2′-OMe; [C] is C, m5C, 2′-MOE C, or 2′-MOE m5C; [G] is optionally G, 2′-Ome G, or 2′-MOE G; and N₂ is 2′H, 2′-MOE or 2′-OMe.
A chirally controlled CpG oligonucleotide composition comprising a CpG oligonucleotide comprising a strand comprising at least four copies of the CpG region motif N₁-(*S)-[C]-(*R)-[G]-(*S)-N₂, where N₁ is 2′H, 2′-MOE or 2′-OMe; [C] is C, m5C, 2′-MOE C, or 2′-MOE m5C; [G] is optionally G, 2′-Ome G, or 2′-MOE G; and N₂ is 2′H, 2′-MOE or 2′-OMe.
A chirally controlled CpG oligonucleotide composition comprising a CpG oligonucleotide comprising a strand comprising at least one copy of the CpG region motif N₁-(*S)-[C]-(*R)-[G]-(*S)-N₂, where N₁ is 2′H; [C] is C, m5C, 2′-MOE C, or 2′-MOE m5C; [G] is optionally G, 2′-Ome G, or 2′-MOE G; and N₂ is 2′H.
A chirally controlled CpG oligonucleotide composition comprising a CpG oligonucleotide comprising a strand comprising at least two copies of the CpG region motif N₁-(*S)-[C]-(*R)-[G]-(*S)-N₂, where N₁ is 2′H; [C] is C, m5C, 2′-MOE C, or 2′-MOE m5C; [G] is optionally G, 2′-Ome G, or 2′-MOE G; and N₂ is 2′H.
A chirally controlled CpG oligonucleotide composition comprising a CpG oligonucleotide comprising a strand comprising at least three copies of the CpG region motif N₁-(*S)-[C]-(*R)-[G]-(*S)-N₂, where N₁ is 2′H; [C] is C, m5C, 2′-MOE C, or 2′-MOE m5C; [G] is optionally G, 2′-Ome G, or 2′-MOE G; and N₂ is 2′H.
A chirally controlled CpG oligonucleotide composition comprising a CpG oligonucleotide comprising a strand comprising at least four copies of the CpG region motif N₁-(*S)-[C]-(*R)-[G]-(*S)-N₂, where N₁ is 2′H; [C] is C, m5C, 2′-MOE C, or 2′-MOE m5C; [G] is optionally G, 2′-Ome G, or 2′-MOE G; and N₂ is 2′H.
A chirally controlled CpG oligonucleotide composition comprising a CpG oligonucleotide comprising a strand comprising at least one copy of the CpG region motif N₁-(*R)-[C]-(*R)-[G]-(*R)-Py, where N₁ and Py are 2′H, 2′-MOE or 2′OMe; and [C] is C or 2′-MOE C; and [G] is G or 2′-MOE G, and Py is 2′-H or 2′-MOE.
A chirally controlled CpG oligonucleotide composition comprising a CpG oligonucleotide comprising a strand comprising at least two copies of the CpG region motif N₁-(*R)-[C]-(*R)-[G]-(*R)-Py, where N₁ and Py are 2′H, 2′-MOE or 2′OMe; and [C] is C or 2′-MOE C; and [G] is G or 2′-MOE G, and Py is 2′-H or 2′-MOE.
A chirally controlled CpG oligonucleotide composition comprising a CpG oligonucleotide comprising a strand comprising at least three copies of the CpG region motif N₁-(*R)-[C]-(*R)-[G]-(*R)-Py, where N₁ and Py are 2′H, 2′-MOE or 2′OMe; and [C] is C or 2′-MOE C; and [G] is G or 2′-MOE G, and Py is 2′-H or 2′-MOE.
A chirally controlled CpG oligonucleotide composition comprising a CpG oligonucleotide comprising a strand comprising at least four copies of the CpG region motif N₁-(*R)-[C]-(*R)-[G]-(*R)-Py, where N₁ and Py are 2′H, 2′-MOE or 2′OMe; and [C] is C or 2′-MOE C; and [G] is G or 2′-MOE G, and Py is 2′-H or 2′-MOE.
A chirally controlled CpG oligonucleotide composition comprising a CpG oligonucleotide comprising a strand comprising at least one copy of the CpG region motif N₁-(*R)-[C]-(*R)-[G]-(*R)-N₂, where N₁ and N₂ are 2′H, 2′-MOE or 2′OMe; and [C] is 2′-MOE m5C; N₂ is 2′-H or 2′-MOE.
A chirally controlled CpG oligonucleotide composition comprising a CpG oligonucleotide comprising a strand comprising at least two copies of the CpG region motif N₁-(*R)-[C]-(*R)-[G]-(*R)-N₂, where N₁ and N₂ are 2′H, 2′-MOE or 2′OMe; and [C] is 2′-MOE m5C; N₂ is 2′-H or 2′-MOE.
A chirally controlled CpG oligonucleotide composition comprising a CpG oligonucleotide comprising a strand comprising at least three copies of the CpG region motif N₁-(*R)-[C]-(*R)-[G]-(*R)-N₂, where N₁ and N₂ are 2′H, 2′-MOE or 2′OMe; and [C] is 2′-MOE m5C; N₂ is 2′-H or 2′-MOE.
A chirally controlled CpG oligonucleotide composition comprising a CpG oligonucleotide comprising a strand comprising at least four copies of the CpG region motif N₁-(*R)-[C]-(*R)-[G]-(*R)-N₂, where N₁ and N₂ are 2′H, 2′-MOE or 2′OMe; and [C] is 2′-MOE m5C; N₂ is 2′-H or 2′-MOE.
A chirally controlled CpG oligonucleotide composition comprising a CpG oligonucleotide comprising a strand comprising at least one copy of the CpG region motif Py-(*R)-C-(*R)-G-(*R)-Py.
A chirally controlled CpG oligonucleotide composition comprising a CpG oligonucleotide comprising a strand comprising at least two copies of the CpG region motif Py-(*R)-C-(*R)-G-(*R)-Py.
A chirally controlled CpG oligonucleotide composition comprising a CpG oligonucleotide comprising a strand comprising at least three copies of the CpG region motif Py-(*R)-C-(*R)-G-(*R)-Py.
A chirally controlled CpG oligonucleotide composition comprising a CpG oligonucleotide comprising a strand comprising at least four copies of the CpG region motif Py-(*R)-C-(*R)-G-(*R)-Py.
A chirally controlled CpG oligonucleotide composition comprising a CpG oligonucleotide comprising a strand comprising at least one copy of the CpG region motif Py-(*R)-C-(*R)-G-(*R)-Py.
A chirally controlled CpG oligonucleotide composition comprising a CpG oligonucleotide comprising a strand comprising at least two copies of the CpG region motif Py-(*R)-C-(*R)-G-(*R)-Py.
A chirally controlled CpG oligonucleotide composition comprising a CpG oligonucleotide comprising a strand comprising at least three copies of the CpG region motif Py-(*R)-C-(*R)-G-(*R)-Py.
A chirally controlled CpG oligonucleotide composition comprising a CpG oligonucleotide comprising a strand comprising at least four copies of the CpG region motif Py-(*R)-C-(*R)-G-(*R)-Py.
A chirally controlled CpG oligonucleotide composition comprising a CpG oligonucleotide comprising a strand comprising at least one copy of the CpG region motif Py-(*S)-C-(*R)-G-(*S)-Py.
A chirally controlled CpG oligonucleotide composition comprising a CpG oligonucleotide comprising a strand comprising at least two copies of the CpG region motif Py-(*S)-C-(*R)-G-(*S)-Py.
A chirally controlled CpG oligonucleotide composition comprising a CpG oligonucleotide comprising a strand comprising at least three copies of the CpG region motif Py-(*S)-C-(*R)-G-(*S)-Py.
A chirally controlled CpG oligonucleotide composition comprising a CpG oligonucleotide comprising a strand comprising at least four copies of the CpG region motif Py-(*S)-C-(*R)-G-(*S)-Py.
A chirally controlled CpG oligonucleotide composition comprising a CpG oligonucleotide comprising a strand comprising at least one copy of the CpG region motif Py-(*S)-C-(*S)-G-(*S)-Py.
A chirally controlled CpG oligonucleotide composition comprising a CpG oligonucleotide comprising a strand comprising at least two copies of the CpG region motif Py-(*S)-C-(*S)-G-(*S)-Py.
A chirally controlled CpG oligonucleotide composition comprising a CpG oligonucleotide comprising a strand comprising at least three copies of the CpG region motif Py-(*S)-C-(*S)-G-(*S)-Py.
A chirally controlled CpG oligonucleotide composition comprising a CpG oligonucleotide comprising a strand comprising at least four copies of the CpG region motif Py-(*S)-C-(*S)-G-(*S)-Py.
A chirally controlled CpG oligonucleotide composition comprising a CpG oligonucleotide comprising a strand comprising at least one copy of the CpG region motif Py-(*R)-[C]-(*R)-[G]-(*R)-Py, where [C] is 2′-MOE C; and [G] is 2′-MOE G.
A chirally controlled CpG oligonucleotide composition comprising a CpG oligonucleotide comprising a strand comprising at least two copies of the CpG region motif Py-(*R)-[C]-(*R)-[G]-(*R)-Py, where [C] is 2′-MOE C; and [G] is 2′-MOE G.
A chirally controlled CpG oligonucleotide composition comprising a CpG oligonucleotide comprising a strand comprising at least three copies of the CpG region motif Py-(*R)-[C]-(*R)-[G]-(*R)-Py, where [C] is 2′-MOE C; and [G] is 2′-MOE G.
A chirally controlled CpG oligonucleotide composition comprising a CpG oligonucleotide comprising a strand comprising at least four copies of the CpG region motif Py-(*R)-[C]-(*R)-[G]-(*R)-Py, where [C] is 2′-MOE C; and [G] is 2′-MOE G.
A chirally controlled CpG oligonucleotide composition comprising a CpG oligonucleotide comprising a strand comprising at least one copy of the CpG region motif Py-(*R)-[C]-(*R)-[G]-(*S)-Py, where [C] is 2′-MOE C; and [G] is 2′-MOE G.
A chirally controlled CpG oligonucleotide composition comprising a CpG oligonucleotide comprising a strand comprising at least two copies of the CpG region motif Py-(*R)-[C]-(*R)-[G]-(*S)-Py, where [C] is 2′-MOE C; and [G] is 2′-MOE G.
A chirally controlled CpG oligonucleotide composition comprising a CpG oligonucleotide comprising a strand comprising at least three copies of the CpG region motif Py-(*R)-[C]-(*R)-[G]-(*S)-Py, where [C] is 2′-MOE C; and [G] is 2′-MOE G.
A chirally controlled CpG oligonucleotide composition comprising a CpG oligonucleotide comprising a strand comprising at least four copies of the CpG region motif Py-(*R)-[C]-(*R)-[G]-(*S)-Py, where [C] is 2′-MOE C; and [G] is 2′-MOE G.
A chirally controlled CpG oligonucleotide composition comprising a CpG oligonucleotide comprising a strand comprising at least one copy of the CpG region motif Py-(*R)-[C]-(*R)-G-(*R)-Py, where [C] is C, 2′-OMe m5C, or 2′-MOE C.
A chirally controlled CpG oligonucleotide composition comprising a CpG oligonucleotide comprising a strand comprising at least two copies of the CpG region motif Py-(*R)-[C]-(*R)-G-(*R)-Py, where [C] is C, 2′-OMe m5C, or 2′-MOE C.
A chirally controlled CpG oligonucleotide composition comprising a CpG oligonucleotide comprising a strand comprising at least three copies of the CpG region motif Py-(*R)-[C]-(*R)-G-(*R)-Py, where [C] is C, 2′-OMe m5C, or 2′-MOE C.
A chirally controlled CpG oligonucleotide composition comprising a CpG oligonucleotide comprising a strand comprising at least four copies of the CpG region motif Py-(*R)-[C]-(*R)-G-(*R)-Py, where [C] is C, 2′-OMe m5C, or 2′-MOE C.
A chirally controlled CpG oligonucleotide composition comprising a CpG oligonucleotide comprising a strand comprising at least one copy of the CpG region motif Py-(*R)-[C]-(*R)-[G]-(*R)-N₁, where [C] is 2′-OMe m5C, and [G] is 2′-OMe G, and N₁ is 2′-OMe.
A chirally controlled CpG oligonucleotide composition comprising a CpG oligonucleotide comprising a strand comprising at least two copies of the CpG region motif Py-(*R)-[C]-(*R)-[G]-(*R)-N₁, where [C] is 2′-OMe m5C, and [G] is 2′-OMe G, and N₁ is 2′-OMe.
A chirally controlled CpG oligonucleotide composition comprising a CpG oligonucleotide comprising a strand comprising at least three copies of the CpG region motif Py-(*R)-[C]-(*R)-[G]-(*R)-N₁, where [C] is 2′-OMe m5C, and [G] is 2′-OMe G, and N₁ is 2′-OMe.
A chirally controlled CpG oligonucleotide composition comprising a CpG oligonucleotide comprising a strand comprising at least four copies of the CpG region motif Py-(*R)-[C]-(*R)-[G]-(*R)-N₁, where [C] is 2′-OMe m5C, and [G] is 2′-OMe G, and N₁ is 2′-OMe.
A chirally controlled CpG oligonucleotide composition comprising a CpG oligonucleotide comprising a strand comprising at least one copy of the CpG region motif Py-(*R)-[C]-(*R)-[G]-(*R)-Py, where [C] is 2′-OMe m5C, and [G] is 2′-OMe G.
A chirally controlled CpG oligonucleotide composition comprising a CpG oligonucleotide comprising a strand comprising at least two copies of the CpG region motif Py-(*R)-[C]-(*R)-[G]-(*R)-Py, where [C] is 2′-OMe m5C, and [G] is 2′-OMe G.
A chirally controlled CpG oligonucleotide composition comprising a CpG oligonucleotide comprising a strand comprising at least three copies of the CpG region motif Py-(*R)-[C]-(*R)-[G]-(*R)-Py, where [C] is 2′-OMe m5C, and [G] is 2′-OMe G.
A chirally controlled CpG oligonucleotide composition comprising a CpG oligonucleotide comprising a strand comprising at least four copies of the CpG region motif Py-(*R)-[C]-(*R)-[G]-(*R)-Py, where [C] is 2′-OMe m5C, and [G] is 2′-OMe G.
A chirally controlled CpG oligonucleotide composition comprising a CpG oligonucleotide comprising a strand comprising at least one copy of the CpG region motif Py-(*R)-[C]-(*R)-[G]-(*R)-Py, where [C] is 2′-OMe C and [G] is 2′-OMe G.
A chirally controlled CpG oligonucleotide composition comprising a CpG oligonucleotide comprising a strand comprising at least two copies of the CpG region motif Py-(*R)-[C]-(*R)-[G]-(*R)-Py, where [C] is 2′-OMe C and [G] is 2′-OMe G.
A chirally controlled CpG oligonucleotide composition comprising a CpG oligonucleotide comprising a strand comprising at least three copies of the CpG region motif Py-(*R)-[C]-(*R)-[G]-(*R)-Py, where [C] is 2′-OMe C and [G] is 2′-OMe G.
A chirally controlled CpG oligonucleotide composition comprising a CpG oligonucleotide comprising a strand comprising at least four copies of the CpG region motif Py-(*R)-[C]-(*R)-[G]-(*R)-Py, where [C] is 2′-OMe C and [G] is 2′-OMe G.
A chirally controlled CpG oligonucleotide composition comprising a CpG oligonucleotide comprising a strand comprising at least one copy of the CpG region motif Py-(*S)-[C]-(*R)-[G]-(*S)-Py, where [C] is 2′-MOE C and [G] is 2′-MOE G.
A chirally controlled CpG oligonucleotide composition comprising a CpG oligonucleotide comprising a strand comprising at least two copies of the CpG region motif Py-(*S)-[C]-(*R)-[G]-(*S)-Py, where [C] is 2′-MOE C and [G] is 2′-MOE G.
A chirally controlled CpG oligonucleotide composition comprising a CpG oligonucleotide comprising a strand comprising at least three copies of the CpG region motif Py-(*S)-[C]-(*R)-[G]-(*S)-Py, where [C] is 2′-MOE C and [G] is 2′-MOE G.
A chirally controlled CpG oligonucleotide composition comprising a CpG oligonucleotide comprising a strand comprising at least four copies of the CpG region motif Py-(*S)-[C]-(*R)-[G]-(*S)-Py, where [C] is 2′-MOE C and [G] is 2′-MOE G.
A chirally controlled CpG oligonucleotide composition comprising a CpG oligonucleotide comprising a strand comprising at least one copy of the CpG region motif Py-(*R)-m5C-(*R)-G-(*R)-Py.
A chirally controlled CpG oligonucleotide composition comprising a CpG oligonucleotide comprising a strand comprising at least two copies of the CpG region motif Py-(*R)-m5C-(*R)-G-(*R)-Py.
A chirally controlled CpG oligonucleotide composition comprising a CpG oligonucleotide comprising a strand comprising at least three copies of the CpG region motif Py-(*R)-m5C-(*R)-G-(*R)-Py.
A chirally controlled CpG oligonucleotide composition comprising a CpG oligonucleotide comprising a strand comprising at least four copies of the CpG region motif Py-(*R)-m5C-(*R)-G-(*R)-Py.
A chirally controlled CpG oligonucleotide composition comprising a CpG oligonucleotide comprising a strand comprising at least one copy of the CpG region motif Py-(*R)-m5C-(*R)-G-(*R)-Py.
A chirally controlled CpG oligonucleotide composition comprising a CpG oligonucleotide comprising a strand comprising at least two copies of the CpG region motif Py-(*R)-m5C-(*R)-G-(*R)-Py.
A chirally controlled CpG oligonucleotide composition comprising a CpG oligonucleotide comprising a strand comprising at least three copies of the CpG region motif Py-(*R)-m5C-(*R)-G-(*R)-Py.
A chirally controlled CpG oligonucleotide composition comprising a CpG oligonucleotide comprising a strand comprising at least four copies of the CpG region motif Py-(*R)-m5C-(*R)-G-(*R)-Py.
A chirally controlled CpG oligonucleotide composition comprising a CpG oligonucleotide comprising a strand comprising at least one copy of the CpG region motif Py-(*S)-m5C-(*R)-G-(*S)-Py.
A chirally controlled CpG oligonucleotide composition comprising a CpG oligonucleotide comprising a strand comprising at least two copies of the CpG region motif Py-(*S)-m5C-(*R)-G-(*S)-Py.
A chirally controlled CpG oligonucleotide composition comprising a CpG oligonucleotide comprising a strand comprising at least three copies of the CpG region motif Py-(*S)-m5C-(*R)-G-(*S)-Py.
A chirally controlled CpG oligonucleotide composition comprising a CpG oligonucleotide comprising a strand comprising at least four copies of the CpG region motif Py-(*S)-m5C-(*R)-G-(*S)-Py.
A chirally controlled CpG oligonucleotide composition comprising a CpG oligonucleotide comprising a strand comprising at least one copy of the CpG region motif Py-(*S)-[C]-(*R)-[G]-(*S)-Py, where [C] is 2′-MOE m5C and [G] is 2′-MOE G.
A chirally controlled CpG oligonucleotide composition comprising a CpG oligonucleotide comprising a strand comprising at least two copies of the CpG region motif Py-(*S)-[C]-(*R)-[G]-(*S)-Py, where [C] is 2′-MOE m5C and [G] is 2′-MOE G.
A chirally controlled CpG oligonucleotide composition comprising a CpG oligonucleotide comprising a strand comprising at least three copies of the CpG region motif Py-(*S)-[C]-(*R)-[G]-(*S)-Py, where [C] is 2′-MOE m5C and [G] is 2′-MOE G.
A chirally controlled CpG oligonucleotide composition comprising a CpG oligonucleotide comprising a strand comprising at least four copies of the CpG region motif Py-(*S)-[C]-(*R)-[G]-(*S)-Py, where [C] is 2′-MOE m5C and [G] is 2′-MOE G.
A chirally controlled CpG oligonucleotide composition comprising a CpG oligonucleotide comprising a strand comprising at least one copy of the CpG region motif Py-(*S)-[C]-(*R)-[G]-(*S)-Py, where [C] is 2′-OMe m5C and [G] is 2′-OMe G.
A chirally controlled CpG oligonucleotide composition comprising a CpG oligonucleotide comprising a strand comprising at least two copies of the CpG region motif Py-(*S)-[C]-(*R)-[G]-(*S)-Py, where [C] is 2′-OMe m5C and [G] is 2′-OMe G.
A chirally controlled CpG oligonucleotide composition comprising a CpG oligonucleotide comprising a strand comprising at least three copies of the CpG region motif Py-(*S)-[C]-(*R)-[G]-(*S)-Py, where [C] is 2′-OMe m5C and [G] is 2′-OMe G.
A chirally controlled CpG oligonucleotide composition comprising a CpG oligonucleotide comprising a strand comprising at least four copies of the CpG region motif Py-(*S)-[C]-(*R)-[G]-(*S)-Py, where [C] is 2′-OMe m5C and [G] is 2′-OMe G.
A chirally controlled CpG oligonucleotide composition comprising a CpG oligonucleotide comprising a strand comprising at least one copy of the CpG region motif Py-(*S)-[C]-(*R)-[G]-(*S)-Py, where [C] is 2′-OMe C and [G] is 2′-OMe G.
A chirally controlled CpG oligonucleotide composition comprising a CpG oligonucleotide comprising a strand comprising at least two copies of the CpG region motif Py-(*S)-[C]-(*R)-[G]-(*S)-Py, where [C] is 2′-OMe C and [G] is 2′-OMe G.
A chirally controlled CpG oligonucleotide composition comprising a CpG oligonucleotide comprising a strand comprising at least three copies of the CpG region motif Py-(*S)-[C]-(*R)-[G]-(*S)-Py, where [C] is 2′-OMe C and [G] is 2′-OMe G.
A chirally controlled CpG oligonucleotide composition comprising a CpG oligonucleotide comprising a strand comprising at least four copies of the CpG region motif Py-(*S)-[C]-(*R)-[G]-(*S)-Py, where [C] is 2′-OMe C and [G] is 2′-OMe G.
A chirally controlled CpG oligonucleotide composition comprising a CpG oligonucleotide comprising a strand comprising at least one copy of the CpG region motif Py-(*R)-[C]-(*R)-[G]-(*R)-Py, where both [C] and [G] are 2′-modified.
A chirally controlled CpG oligonucleotide composition comprising a CpG oligonucleotide comprising a strand comprising at least two copies of the CpG region motif Py-(*R)-[C]-(*R)-[G]-(*R)-Py, where both [C] and [G] are 2′-modified.
A chirally controlled CpG oligonucleotide composition comprising a CpG oligonucleotide comprising a strand comprising at least three copies of the CpG region motif Py-(*R)-[C]-(*R)-[G]-(*R)-Py, where both [C] and [G] are 2′-modified.
A chirally controlled CpG oligonucleotide composition comprising a CpG oligonucleotide comprising a strand comprising at least four copies of the CpG region motif Py-(*R)-[C]-(*R)-[G]-(*R)-Py, where both [C] and [G] are 2′-modified.
A chirally controlled CpG oligonucleotide composition comprising a CpG oligonucleotide comprising a strand comprising at least one copy of the CpG region motif N₁-(*R)-[C]-(*R)-[G]-(*R)-N₂, where both [C] and [G] are 2′-modified.
A chirally controlled CpG oligonucleotide composition comprising a CpG oligonucleotide comprising a strand comprising at least two copies of the CpG region motif N₁-(*R)-[C]-(*R)-[G]-(*R)-N₂, where both [C] and [G] are 2′-modified.
A chirally controlled CpG oligonucleotide composition comprising a CpG oligonucleotide comprising a strand comprising at least three copies of the CpG region motif N₁-(*R)-[C]-(*R)-[G]-(*R)-N₂, where both [C] and [G] are 2′-modified.
A chirally controlled CpG oligonucleotide composition comprising a CpG oligonucleotide comprising a strand comprising at least four copies of the CpG region motif N₁-(*R)-[C]-(*R)-[G]-(*R)-N₂, where both [C] and [G] are 2′-modified.

[1841] In various embodiments, the CpG oligonucleotide is capable of antagonizing an immune response in human cells. In various embodiments, at least one nucleoside is 2′H (DNA). In various embodiments, the CpG oligonucleotide is between 15 and 49 nt in length. In various embodiments, the CpG oligonucleotide is capable of antagonizing an immune response in human cells, and/or C is unmethylated C, and/or at least one nucleoside is 2′H (DNA), and/or the CpG oligonucleotide is between 15 and 49 nt in length.

[1842] In some embodiments, the present disclosure provides various CpG oligonucleotides comprising any of various CpG region motifs which either agonize or antagonize an immune response.

Methods of Identifying Oligonucleotides with Decreased Immune Response

[1843] The present disclosure notes that it may be desirable to produce a variant of an oligonucleotide with decreased agonism of an immune response. In some embodiments, such a variant can be, for example, modified and/or be stereopure or chirally controlled oligonucleotide composition. In some embodiments, such a variant can also, for example, have higher stability, a shorter length, improved biological activity (e.g., if the oligonucleotide of which the variant is made has a desirable biological activity), etc. For example, if an oligonucleotide has a desirable biological activity but is immunogenic, a variant can be generated which has a higher biological activity, thus allowing a lower amount of nucleic acid to be administered to a patient, which can act to reduce the immunogenicity.

[1844] The oligonucleotide can be, as a non-limiting example, an oligonucleotide intended for therapeutic use. The oligonucleotide can be an antisense oligonucleotide (ASO), RNAi agent (e.g., single or double stranded siRNA), miRNA, miRNA inhibitor, CRISPR, mRNA, etc. As a non-limiting example, the oligonucleotide may be designed to perform a function such as reducing or increasing the expression of a target gene or level of a target protein, which is completely independent of any immune reaction.

[1845] As a non-limiting example, the oligonucleotide intended for therapeutic use can be a stereomixture. Various stereopure (or mostly stereopure) variants can be produced, including variants which may avoid CpG region motifs which agonize an immune response. The variants can be tested for immune stimulation (using any method known in the art to test the immune stimulation mediated by a CpG oligonucleotide). A variant which has decreased agonism of an immune response can then be selected.

[1846] Alternatively, if the oligonucleotide is already stereopure (or mostly stereopure), then one or more variants can be provided and tested, and one or more variant oligonucleotides with the desired immune response can be selected.

[1847] In some cases, it can be desirable that a variant oligonucleotide be produced which neither agonizes nor antagonizes an immune response. Thus, variants can be designed and provided which can avoid CpG region motifs that agonize or antagonize an immune response.

[1848] In some cases, it may not be possible to design an oligonucleotide which completely eliminates agonism of an immune response, but it can be possible to provide variants with different stereochemistry, at least one of which has a reduced ability to agonize an immune response. Thus, CpG region motifs can be selected for use in the variant oligonucleotides which mediate a reduced immune response. For example, the CpG region motif N₁-(*R/S)-C-(*R/S)-G-(*R)-N₂ is generally less agonistic than CpG oligonucleotides comprising the CpG region motif N₁-(*R/S)-C-(*R/S)-G-(*S)-N₂ (see FIG. 7, for example). selection of an oligonucleotide which mediates a decreased immune response can involve the step of selecting a CpG region motif which mediates a decreased immune response.

[1849] Thus, the present disclosure provides the method of designing and/or producing an oligonucleotide, wherein the oligonucleotide neither agonizes nor antagonizes an immune response, the method comprising the step of designing and/or producing the oligonucleotide to not include a novel CpG region motif associated with agonism or antagonism of an immune response, as described herein.

Methods of Identifying Oligonucleotides with Greater Antagonism of an Immune Response

[1850] The present disclosure notes that it may be desirable to produce a variant of an oligonucleotide with greater, increased or higher antagonism of an immune response. In some embodiments, such a variant can be, for example, modified and/or be stereopure or chirally controlled oligonucleotide composition. In some embodiments, such a variant can also, for example, have higher stability, a shorter length, improved biological activity (e.g., if the oligonucleotide of which the variant is made has a desirable biological activity), etc.

[1851] The oligonucleotide can be, as a non-limiting example, an oligonucleotide intended for therapeutic use. The oligonucleotide can be an antisense oligonucleotide (ASO), RNAi agent (e.g., single or double stranded siRNA), miRNA, miRNA inhibitor, CRISPR, mRNA, etc. As a non-limiting example, the oligonucleotide may be designed to perform a function such as reducing or increasing the expression of a target gene or level of a target protein, which is completely independent of any immune reaction.

[1852] As a non-limiting example, the oligonucleotide intended for therapeutic use can be a stereomixture. Various stereopure (or mostly stereopure) variants can be produced, including variants which may avoid CpG region motifs which agonize an immune response or variants which incorporate CpG region motifs identified herein which antagonise an immune response. The variants can be tested for immune stimulation (using any method known in the art to test the immune stimulation mediated by a CpG oligonucleotide). A variant which has greater antagonism of an immune response can then be selected.

[1853] Alternatively, if the oligonucleotide is already stereopure (or mostly stereopure), then one or more variants can be provided and tested, and one or more variant oligonucleotides with the desired immune response can be selected.

[1854] Thus, the present disclosure provides the method of designing and/or producing an oligonucleotide, wherein the oligonucleotide has greater or increased antagonism of an immune response, the method comprising the step of designing and/or producing the oligonucleotide to not include a novel CpG region motif associated with agonism and/or to include a novel CpG region motif associated with antagonism of an immune response, as described herein.

[1855] In some embodiments, the present disclosure pertains to:

[1856] A method of identifying a second oligonucleotide mediating decreased immune stimulation in a human cell relative to the immune stimulation mediated by a first oligonucleotide, the method comprising the steps of:
[1857] (a) measuring the immune stimulation mediated by a first oligonucleotide, wherein the first oligonucleotide has a defined base sequence comprising at least one CpG region;
[1858] (b) measuring the immune stimulation mediated by one or more second oligonucleotides, wherein the second oligonucleotides have the same base sequence as the first oligonucleotide and further comprise one or more phosphorothioates in the CpG region, wherein the stereochemistry of the phosphorothioates in the CpG region of the second oligonucleotides differs from the stereochemistry of any phosphorothioates in the CpG region of the first oligonucleotides, wherein steps (a) and (b) can be performed in any order;
[1859] (c) selecting a second oligonucleotide which mediates less immune stimulation than the first oligonucleotide.

[1860] The method of any preceding embodiment, wherein the first oligonucleotide is immunostimulatory in a human cell.

[1861] The method of any preceding embodiments, wherein the second oligonucleotide comprises at least one phosphorothioate in the Sp conformation and at least one phosphorothioate in the Rp conformation in the CpG region motif.

[1862] The method of any preceding embodiment, wherein the second oligonucleotide does not comprise an agonistic CpG region motif described herein.

[1863] The method of any preceding embodiment, wherein the second oligonucleotide does not comprise an antagonistic CpG region motif described herein.

[1864] The method of any preceding embodiment, wherein the second oligonucleotide does not comprise an agonistic or antagonistic CpG region motif described herein.

[1865] A method of designing a second oligonucleotide mediating decreased immune stimulation in a human cell relative to the immune stimulation mediated by a first oligonucleotide, the method comprising the steps of:
[1866] (a) measuring the immune stimulation mediated by a first oligonucleotide, wherein the first oligonucleotide has a defined base sequence comprising at least one CpG region;
[1867] (b) measuring the immune stimulation mediated by one or more second oligonucleotides, wherein the second oligonucleotides have the same base sequence as the first oligonucleotide and further comprise one or more phosphorothioates in the CpG region, wherein the stereochemistry of the phosphorothioates in the CpG region of the second oligonucleotides differs from the stereochemistry of any phosphorothioates in the CpG region of the first oligonucleotides, wherein steps (a) and (b) can be performed in any order;
[1868] (c) selecting a second oligonucleotide which mediates less immune stimulation than the first oligonucleotide.

[1869] The method of any preceding embodiment, wherein the first oligonucleotide is immunostimulatory in a human cell.

[1870] The method of any preceding embodiments, wherein the second oligonucleotide comprises at least one phosphorothioate in the Sp conformation and at least one phosphorothioate in the Rp conformation in the CpG region motif.

[1871] The method of any preceding embodiment, wherein the second oligonucleotide does not comprise an agonistic CpG region motif described herein.

[1872] The method of any preceding embodiment, wherein the second oligonucleotide does not comprise an antagonistic CpG region motif described herein.

[1873] The method of any preceding embodiment, wherein the second oligonucleotide does not comprise an agonistic or antagonistic CpG region motif described herein.

[1874] A method of decreasing the immune stimulation in a human cell mediated by a first oligonucleotide, the method comprising the steps of:
[1875] (a) providing the first oligonucleotide, wherein the first oligonucleotide has a defined base sequence comprising at least one CpG region; and measuring the immune stimulation in a human cell mediated by the first oligonucleotide;
[1876] (b) providing one or more second oligonucleotides, wherein the second oligonucleotides have the same base sequence as the first oligonucleotide and further comprise one or more phosphorothioates in the CpG region, wherein the stereochemistry of the phosphorothioates in the CpG region of the second oligonucleotides differs from the stereochemistry of any phosphorothioates in the CpG region of the first oligonucleotides; and measuring the immune stimulation in a human cell of the second oligonucleotides, wherein steps
[1877] (a) and (b) can be performed in any order; (c) selecting a second oligonucleotide which mediates less immune stimulation than the first oligonucleotide; and (d) contacting the cell with the second oligonucleotide.

[1878] The method of any preceding embodiment, wherein the first oligonucleotide is immunostimulatory in a human cell.

[1879] The method of any preceding embodiments, wherein the second oligonucleotide comprises at least one phosphorothioate in the Sp conformation and at least one phosphorothioate in the Rp conformation in the CpG region motif.

[1880] The method of any preceding embodiment, wherein the second oligonucleotide does not comprise an agonistic CpG region motif described herein.

[1881] The method of any preceding embodiment, wherein the second oligonucleotide does not comprise an antagonistic CpG region motif described herein.

[1882] The method of any preceding embodiment, wherein the second oligonucleotide does not comprise an agonistic or antagonistic CpG region motif described herein.

[1883] A composition comprising an oligonucleotide, wherein the oligonucleotide mediates less immune stimulation than a reference oligonucleotide, wherein the second oligonucleotide is selected using a method comprising the steps of:
[1884] (a) providing the reference oligonucleotide, wherein the reference oligonucleotide has a defined base sequence comprising at least one CpG region; and measuring the immune stimulation in a human cell mediated by the reference oligonucleotide;
[1885] (b) providing one or more second oligonucleotides, wherein the second oligonucleotides have the same base sequence as the reference oligonucleotide and further comprise one or more phosphorothioates in the CpG region, wherein the stereochemistry of the phosphorothioates in the CpG region of the second oligonucleotides differs from the stereochemistry of any phosphorothioates in the CpG region of the reference oligonucleotides; and measuring the immune stimulation in a human cell of the second oligonucleotides, wherein steps (a) and (b) can be performed in any order;
[1886] (c) selecting a second oligonucleotide which mediates less immune stimulation than the reference oligonucleotide.

[1887] The method or composition of any preceding embodiment, wherein the reference oligonucleotide is immunostimulatory in a human cell.

[1888] The method or composition of any preceding embodiments, wherein the second oligonucleotide comprises at least one phosphorothioate in the Sp conformation and at least one phosphorothioate in the Rp conformation in the CpG region motif.

[1889] The method or composition of any preceding embodiment, wherein the second oligonucleotide does not comprise an agonistic CpG region motif described herein.

[1890] The method or composition of any preceding embodiment, wherein the second oligonucleotide does not comprise an antagonistic CpG region motif described herein.

[1891] The method or composition of any preceding embodiment, wherein the second oligonucleotide does not comprise an agonistic or antagonistic CpG region motif described herein.

[1892] A method of administering a therapeutic oligonucleotide to a patient, wherein the therapeutic oligonucleotide mediates less immune stimulation than a first oligonucleotide, wherein the therapeutic oligonucleotide is selected using a method comprising the steps of:
[1893] (a) providing the first oligonucleotide, wherein the first oligonucleotide has a defined base sequence comprising at least one CpG region; and measuring the immune stimulation in a human cell mediated by the first oligonucleotide;
[1894] (b) providing one or more second oligonucleotides, wherein the second oligonucleotides have the same base sequence as the first oligonucleotide and further comprise one or more phosphorothioates in the CpG region, wherein the stereochemistry of the phosphorothioates in the CpG region of the second oligonucleotides differs from the stereochemistry of any phosphorothioates in the CpG region of the first oligonucleotides; and measuring the immune stimulation in a human cell of the second oligonucleotides, wherein steps (a) and (b) can be performed in any order;
[1895] (c) selecting a second oligonucleotide which mediates less immune stimulation than the first oligonucleotide as the therapeutic oligonucleotide.

[1896] The method of any preceding embodiment, wherein the first oligonucleotide is immunostimulatory in a human cell.

[1897] The method of any preceding embodiment, wherein the second oligonucleotide comprises at least one phosphorothioate in the Sp conformation and at least one phosphorothioate in the Rp conformation in the CpG region motif.

[1898] The method of any preceding embodiment, wherein the second oligonucleotide does not comprise an agonistic CpG region motif described herein.

[1899] The method of any preceding embodiment, wherein the second oligonucleotide does not comprise an antagonistic CpG region motif described herein.

[1900] The method of any preceding embodiment, wherein the second oligonucleotide does not comprise an agonistic or antagonistic CpG region motif described herein.

[1901] The present disclosure thus presents various methods for identifying variants of oligonucleotides comprising a CpG region which are capable of mediating less agonism of an immune response.

Methods of Identifying Oligonucleotides with Increased Agonism of an Immune Response

[1902] The present disclosure also provides methods of increasing the immune response agonized by an oligonucleotide intended for therapeutic use and comprising a CpG, if an agonized immune response is desired. The present disclosure notes that it may be desirable to produce a variant of an oligonucleotide with increased agonism of an immune response. In some embodiments, such a variant can be, for example, modified and/or be stereopure or chirally controlled oligonucleotide composition. In some embodiments, such a variant can also, for example, have higher stability, a shorter length, improved biological activity (e.g., if the oligonucleotide of which the variant is made has a desirable biological activity), etc.

[1903] The oligonucleotide can be, as non-limiting examples, an antisense oligonucleotide (ASO), RNAi agent (e.g., single or double stranded siRNA), miRNA, miRNA inhibitor, CRISPR, mRNA, etc. Such oligonucleotides may be designed to perform a function such as reducing or increasing the expression of a target gene or level of a target protein, which is completely independent of any immune reaction.

[1904] Many CpG oligonucleotides, as disclosed herein and including some designed for therapeutic use, are capable of agonizing an immune response, making them useful as vaccine adjuvants and mono- and combination therapies. It may be desirable to increase the immune response mediated by a CpG oligonucleotide.

[1905] As a non-limiting example, the oligonucleotide intended for therapeutic use can be a stereomixture. Various stereopure (or mostly stereopure) variants can be produced, including variants which may include CpG region motifs which agonize an immune response. The variants can be tested for immune stimulation (using any method known in the art to test the immune stimulation mediated by a CpG oligonucleotide). A variant which has increased agonism of an immune response can then be selected.

[1906] Alternatively, if the oligonucleotide is already stereopure (or mostly stereopure), then one or more variants can be provided and tested, and one or more variant oligonucleotides with the desired immune response can be selected.

[1907] The present disclosure notes that some CpG region motifs appear, in at least some experiments, to elicit a greater immune response than others. For example, the CpG region motif N₁-(*R/S)-C-(*R/S)-G-(*R)-N₂ is generally less agonistic than CpG oligonucleotides comprising the CpG region motif N₁-(*R/S)-C-(*R/S)-G-(*S)-N₂ (see FIG. 7, for example). Thus, selection of an oligonucleotide which mediates an increased immune response can involve the step of selecting a CpG region motif which mediates an increased immune response.

[1908] In some embodiments, the present disclosure pertains to:

[1909] A method of identifying a second oligonucleotide mediating increased immune stimulation in a human cell relative to the immune stimulation mediated by a first oligonucleotide, the method comprising the steps of:
[1910] (a) measuring the immune stimulation mediated by a first oligonucleotide, wherein the first oligonucleotide has a defined base sequence comprising at least one CpG region;
[1911] (b) measuring the immune stimulation mediated by one or more second oligonucleotides, wherein the second oligonucleotides have the same base sequence as the first oligonucleotide and further comprise one or more phosphorothioates in the CpG region, wherein the stereochemistry of the phosphorothioates in the CpG region of the second oligonucleotides differs from the stereochemistry of any phosphorothioates in the CpG region of the first oligonucleotides, wherein steps (a) and (b) can be performed in any order;
[1912] (c) selecting a second oligonucleotide which mediates more immune stimulation than the first oligonucleotide.

[1913] The method of any preceding embodiment, wherein the first oligonucleotide is immunostimulatory in a human cell.

[1914] The method of any preceding embodiments, wherein the second oligonucleotide comprises at least one phosphorothioate in the Sp conformation and at least one phosphorothioate in the Rp conformation in the CpG region motif.

[1915] The method of any preceding embodiment, wherein the second oligonucleotides comprises an agonistic CpG region motif described herein.

[1916] The method of any preceding embodiment, wherein the second oligonucleotide does not comprise an antagonistic CpG region motif described herein.

[1917] A method of designing a second oligonucleotide mediating increased immune stimulation in a human cell relative to the immune stimulation mediated by a first oligonucleotide, the method comprising the steps of:
[1918] (a) measuring the immune stimulation mediated by a first oligonucleotide, wherein the first oligonucleotide has a defined base sequence comprising at least one CpG region;
[1919] (b) measuring the immune stimulation mediated by one or more second oligonucleotides, wherein the second oligonucleotides have the same base sequence as the first oligonucleotide and further comprise one or more phosphorothioates in the CpG region, wherein the stereochemistry of the phosphorothioates in the CpG region of the second oligonucleotides differs from the stereochemistry of any phosphorothioates in the CpG region of the first oligonucleotides, wherein steps (a) and (b) can be performed in any order;
[1920] (c) selecting a second oligonucleotide which mediates more immune stimulation than the first oligonucleotide.

[1921] The method of any preceding embodiment, wherein the first oligonucleotide is immunostimulatory in a human cell.

[1922] The method of any preceding embodiments, wherein the second oligonucleotide comprises at least one phosphorothioate in the Sp conformation and at least one phosphorothioate in the Rp conformation in the CpG region motif.

[1923] The method of any preceding embodiment, wherein the second oligonucleotides comprises an agonistic CpG region motif described herein.

[1924] The method of any preceding embodiment, wherein the second oligonucleotide does not comprise an antagonistic CpG region motif described herein.

[1925] A method of decreasing the immune stimulation in a human cell mediated by a first oligonucleotide, the method comprising the steps of:
[1926] (a) providing the first oligonucleotide, wherein the first oligonucleotide has a defined base sequence comprising at least one CpG region; and measuring the immune stimulation in a human cell mediated by the first oligonucleotide;
[1927] (b) providing one or more second oligonucleotides, wherein the second oligonucleotides have the same base sequence as the first oligonucleotide and further comprise one or more phosphorothioates in the CpG region, wherein the stereochemistry of the phosphorothioates in the CpG region of the second oligonucleotides differs from the stereochemistry of any phosphorothioates in the CpG region of the first oligonucleotides; and measuring the immune stimulation in a human cell of the second oligonucleotides, wherein steps (a) and (b) can be performed in any order;
[1928] (c) selecting a second oligonucleotide which mediates more immune stimulation than the first oligonucleotide; and
[1929] (d) contacting the cell with the second oligonucleotide.

[1930] The method of any preceding embodiment, wherein the first oligonucleotide is immunostimulatory in a human cell.

[1931] The method of any preceding embodiments, wherein the second oligonucleotide comprises at least one phosphorothioate in the Sp conformation and at least one phosphorothioate in the Rp conformation in the CpG region motif.

[1932] The method of any preceding embodiment, wherein the second oligonucleotides comprises an agonistic CpG region motif described herein.

[1933] The method of any preceding embodiment, wherein the second oligonucleotide does not comprise an antagonistic CpG region motif described herein.

[1934] A composition comprising an oligonucleotide, wherein the oligonucleotide mediates more immune stimulation than a reference oligonucleotide, wherein the second oligonucleotide is selected using a method comprising the steps of:
[1935] (a) providing the reference oligonucleotide, wherein the reference oligonucleotide has a defined base sequence comprising at least one CpG region; and measuring the immune stimulation in a human cell mediated by the reference oligonucleotide;
[1936] (b) providing one or more second oligonucleotides, wherein the second oligonucleotides have the same base sequence as the reference oligonucleotide and further comprise one or more phosphorothioates in the CpG region, wherein the stereochemistry of the phosphorothioates in the CpG region of the second oligonucleotides differs from the stereochemistry of any phosphorothioates in the CpG region of the reference oligonucleotides; and measuring the immune stimulation in a human cell of the second oligonucleotides, wherein steps (a) and (b) can be performed in any order;
[1937] (c) selecting a second oligonucleotide which mediates more immune stimulation than the reference oligonucleotide.

[1938] The method or composition of any preceding embodiment, wherein the reference oligonucleotide is immunostimulatory in a human cell.

[1939] The method or composition of any preceding embodiments, wherein the second oligonucleotide comprises at least one phosphorothioate in the Sp conformation and at least one phosphorothioate in the Rp conformation in the CpG region motif.

[1940] The method or composition of any preceding embodiment, wherein the second oligonucleotides comprises an agonistic CpG region motif described herein.

[1941] The method or composition of any preceding embodiment, wherein the second oligonucleotide does not comprise an antagonistic CpG region motif described herein.

[1942] A method of administering a therapeutic oligonucleotide to a patient, wherein the therapeutic oligonucleotide mediates more immune stimulation than a first oligonucleotide, wherein the therapeutic oligonucleotide is selected using a method comprising the steps of:
[1943] (a) providing the first oligonucleotide, wherein the first oligonucleotide has a defined base sequence comprising at least one CpG region; and measuring the immune stimulation in a human cell mediated by the first oligonucleotide;
[1944] (b) providing one or more second oligonucleotides, wherein the second oligonucleotides have the same base sequence as the first oligonucleotide and further comprise one or more phosphorothioates in the CpG region, wherein the stereochemistry of the phosphorothioates in the CpG region of the second oligonucleotides differs from the stereochemistry of any phosphorothioates in the CpG region of the first oligonucleotides; and measuring the immune stimulation in a human cell of the second oligonucleotides, wherein steps (a) and (b) can be performed in any order;
[1945] (c) selecting a second oligonucleotide which mediates more immune stimulation than the first oligonucleotide as the therapeutic oligonucleotide.

[1946] The method of any preceding embodiment, wherein the first oligonucleotide is immunostimulatory in a human cell.

[1947] The method of any preceding embodiment, wherein the second oligonucleotide comprises at least one phosphorothioate in the Sp conformation and at least one phosphorothioate in the Rp conformation in the CpG region motif.

[1948] The method of any preceding embodiment, wherein the second oligonucleotides comprises an agonistic CpG region motif described herein.

[1949] The method of any preceding embodiment, wherein the second oligonucleotide does not comprise an antagonistic CpG region motif described herein.

[1950] The present disclosure pertains to the recognition that the immune response mediated by a CpG oligonucleotide can be affected by the stereochemistry of the phosphorothioates in a CpG region motif in the oligonucleotide.

[1951] The present disclosure thus pertains to compositions and methods related to CpG oligonucleotides comprising one or more copies of a CpG region motif. Various motifs, which are defined at least in part by the stereochemistry of the phosphorothioates in the CpG region, can either agonize or antagonize an immunostimulatory effect. CpG oligonucleotides comprising an immunostimulatory CpG region motif can be used, for example, as a vaccine adjuvant or mono- or combination therapy. If no immune modulation is desired, the present disclosure also provides methods of identifying oligonucleotides which have decreased immune modulation, e.g., those lacking CpG region motifs which agonize or antagonize an immune response. Oligos intended for therapeutic use can thus be screened for immune modulation mediated by CpG region motifs, and modified variants of these oligonucleotides can be prepared which have less immune modulation. In some embodiments, if more immune response is desired, the present disclosure provides methods of identifying a modified variant of an oligonucleotide with a CpG region motif capable of mediating an increased immune response.

[1952] In some embodiments, the present disclosure provides the following example embodiments:

1. A chirally controlled oligonucleotide composition comprising a CpG oligonucleotide comprising a strand comprising about 14 to about 49 nucleotides, wherein the strand comprises at least one copy of CpG region motif N₁-(*R/S)-C-(*R/S)-G-(*R/S)-N₂, wherein at least one (*R/S) is a modified internucleotidic linkage in the Rp conformation and at least one (*R/S) is a modified internucleotidic linkage in the Sp conformation, and each of N₁ and N₂ is independently any nucleoside.
2. A chirally controlled oligonucleotide composition comprising a CpG oligonucleotide comprising a strand comprising about 14 to about 49 nucleotides, wherein the strand comprises at least one copy of CpG region motif N₁-(*R/S)-C-(*R/S)-G-(*R/S)-N₂, wherein at least one (*R/S) is a phosphorothioate in the Rp conformation and at least one (*R/S) is a phosphorothioate in the Sp conformation, and each of N₁ and N₂ is independently any nucleoside.
3. A composition comprising a CpG oligonucleotide comprising a strand comprising about 14 to about 49 nucleotides, wherein the strand comprises at least one copy of CpG region motif N₁-(*R/S)-C-(*R/S)-G-(*R/S)-N₂, wherein at least one (*R/S) is a phosphorothioate in the Rp conformation and at least one (*R/S) is a phosphorothioate in the Sp conformation, and each of N₁ and N₂ is independently any nucleoside.
4. A composition comprising a plurality of oligonucleotides, each of which:
[1953] (a) hybridizes with a particular target sequence; and
[1954] (b) comprises a sequence that includes at least one CpG region motif present in all oligonucleotides of the plurality (a “common CpG region motif”), which CpG region motif has a structure:

[chemical structure]

wherein each (*R/S) is independently a chiral internucleotidic linkage, and each of N₁ and N₂ is independently any nucleoside.
5. A composition comprising a plurality of oligonucleotides, each of which:
[1955] (a) consists of a particular base sequence; and
[1956] (b) comprises a sequence that includes at least one CpG region motif present in all oligonucleotides of the plurality (a “common CpG region motif”), which CpG region motif has a structure:

[chemical structure]

wherein at least one (*R/S) is a phosphorothioate in the Rp conformation and at least one (*R/S) is a phosphorothioate in the Sp conformation, and each of N₁ and N₂ is independently any nucleoside.
4. A composition comprising a plurality of oligonucleotides, each of which:
[1957] (a) hybridizes with a particular target sequence; and
[1958] (b) has a sequence that includes at least one CpG region motif present in all oligonucleotides of the plurality (a “common CpG region motif”), which CpG region motif has a structure:

[chemical structure]

wherein each (*R/S) is independently a chiral internucleotidic linkage, wherein the composition is chirally controlled in that it contains a predetermined level of each of stereoisomers 1-8 (S1-S8) for each common CpG region motif:

[chemical structure]

5. An oligonucleotide composition that is chirally controlled in that the composition comprises a predetermined level of oligonucleotides of an individual oligonucleotide type, wherein an oligonucleotide type is defined by:
[1959] 1) base sequence;
[1960] 2) pattern of backbone linkages;
[1961] 3) pattern of backbone chiral centers; and
[1962] 4) pattern of backbone phosphorus modifications;
   wherein each oligonucleotide of the individual oligonucleotide type independently comprises at least one common CpG region motif:

[chemical structure]

wherein each (*R/S) is independently a chiral internucleotidic linkage, and each of N₁ and N₂ is independently any nucleoside.
5a. An oligonucleotide composition that is chirally controlled in that the composition comprises a predetermined level of oligonucleotides of an individual oligonucleotide type, wherein an oligonucleotide type is defined by:
[1963] 1) base sequence;
[1964] 2) pattern of backbone linkages;
[1965] 3) pattern of backbone chiral centers; and
[1966] 4) pattern of backbone phosphorus modifications;
   wherein each oligonucleotide of the individual oligonucleotide type independently comprises at least one common CpG.
   5b. An oligonucleotide composition that is chirally controlled in that the composition comprises a predetermined level of a plurality of oligonucleotides, which plurality of oligonucleotides share common:
[1967] 1) base sequence;
[1968] 2) pattern of backbone linkages;
[1969] 3) pattern of backbone phosphorus modifications;
   wherein each oligonucleotide of the plurality independently comprises at least one common CpG region motif:

[chemical structure]

wherein each (*R/S) is independently a chiral internucleotidic linkage, and each of N₁ and N₂ is independently any nucleoside; and
where the plurality of oligonucleotides share the same stereochemistry at at least 1, 2, 3, 4, 5, 6, 7, 8, 9, 10, 11, 12, 13, 14, 15, 16, 17, 18, 19, or 20 chiral linkage phosphorus atoms of chiral internucleotidic linkages.
5c. The oligonucleotide composition of embodiment 5b, wherein the plurality of oligonucleotides share the same stereochemistry at at least 5, 6, 7, 8, 9, 10, 11, 12, 13, 14, 15, 16, 17, 18, 19, or 20 chiral linkage phosphorus atoms of chiral internucleotidic linkages.
5d. The oligonucleotide composition of embodiment 5b, wherein the plurality of oligonucleotides share the same stereochemistry at at least 10, 11, 12, 13, 14, 15, 16, 17, 18, 19, or 20 chiral linkage phosphorus atoms of chiral internucleotidic linkages.
6. A composition comprising a plurality of oligonucleotides, each of which:
[1970] (a) hybridizes with a particular target sequence;
[1971] (b) has a base sequence that includes at least one C residue in a CpG region motif that is present in all oligonucleotides of the plurality (a “common C residue”) and that has a modified base moiety, a modified sugar moiety, or both; and
[1972] (c) includes one or more chiral internucleotidic linkages, so that each oligonucleotide is a particular stereoform, characterized by its stereoidentity at each of the one or more chiral internucleotidic linkages, wherein stereoidentity identifies which stereoisomer is present at a particular chiral internucleotidic linkage, wherein the composition is chirally controlled in that it contains a predetermined level of each stereoform.
   6a. A composition comprising a plurality of oligonucleotides, each of which:
[1973] (a) hybridizes with a particular target sequence;
[1974] (b) has a base sequence that includes at least one C residue in a CpG region motif that is present in all oligonucleotides of the plurality (a “common C residue”) and that has a 5-methyl group, a modified sugar moiety, or both; and
[1975] (c) includes one or more chiral internucleotidic linkages, so that each oligonucleotide is a particular stereoform, characterized by its stereoidentity at each of the one or more chiral internucleotidic linkages, wherein stereoidentity identifies which stereoisomer is present at a particular chiral internucleotidic linkage, wherein
   the composition is chirally controlled in that it contains a predetermined level of each stereoform.
   6b. The composition of any one of the preceding embodiments, wherein oligonucleotides of the composition are TLR9 agonists.
   6c. The composition of any one of the preceding embodiments, wherein the composition has an enhanced ability to activate a TLR9-mediated and/or TLR9-associated immune response relative to the ability of a composition that is not chirally controlled in that the composition comprises a random level of oligonucleoitdes of an individual oligonucleotide type.
   7. An oligonucleotide composition that is chirally controlled in that the composition comprises a predetermined level of oligonucleotides of an individual oligonucleotide type, wherein an oligonucleotide type is defined by:
[1976] 1) base sequence;
[1977] 2) pattern of backbone linkages;
[1978] 3) pattern of backbone chiral centers; and
[1979] 4) pattern of backbone phosphorus modifications;
   wherein the base sequence includes at least one C residue in a CpG region motif that has a modified base, a modified sugar moiety, or both; and
   the composition has a reduced ability to activate a TLR9-mediated and/or TLR9-associated immune response relative to the ability of a composition that is not chirally controlled in that the composition comprises a random level of oligonucleotides of an individual oligonucleotide type.
   7a. An oligonucleotide composition that is chirally controlled in that the composition comprises a predetermined level of oligonucleotides of an individual oligonucleotide type, wherein an oligonucleotide type is defined by:
[1980] 1) base sequence;
[1981] 2) pattern of backbone linkages;
[1982] 3) pattern of backbone chiral centers; and
[1983] 4) pattern of backbone phosphorus modifications;
   wherein the base sequence includes at least one C residue in a CpG region motif that has a 5-methyl group, a modified sugar moiety, or both; and
   the composition has a reduced ability to activate a TLR9-mediated and/or TLR9-associated immune response relative to the ability of a composition that is not chirally controlled in that the composition comprises a random level of oligonucleotides of an individual oligonucleotide type.
   8. The composition of any one of the preceding embodiments, wherein oligonucleotides of the composition comprise two or more CpG.
   8a. The composition of any one of the preceding embodiments, wherein oligonucleotides of the composition comprise three or more CpG.
   8b. The composition of any one of the preceding embodiments, wherein oligonucleotides of the composition comprise four or more CpG.
   8c. The composition of any one of the preceding embodiments, wherein oligonucleotides of the composition comprise five or more CpG.
   8d. A chirally controlled oligonucleotide composition comprising a CpG oligonucleotide comprising a strand comprising about 14 to about 49 nucleotides, wherein the strand comprises at least one copy of any CpG region motif disclosed herein.
   9. A chirally controlled oligonucleotide composition comprising a CpG oligonucleotide comprising a strand comprising about 14 to about 49 nucleotides, wherein the strand comprises at least one copy of any CpG region motif of any CpG oligonucleotide disclosed herein.
   10. A chirally controlled oligonucleotide composition comprising a CpG oligonucleotide comprising a strand comprising about 14 to about 49 nucleotides, wherein the strand comprises or consists of the sequence of any oligonucleotide disclosed herein.
   11. A chirally controlled oligonucleotide composition comprising a CpG oligonucleotide comprising a strand comprising 14 to 49 nucleotides, wherein the strand comprises at least one copy of any CpG region motif disclosed herein.
   12. A chirally controlled oligonucleotide composition comprising a CpG oligonucleotide comprising a strand comprising 14 to 49 nucleotides, wherein the strand comprises at least one copy of any CpG region motif of any CpG oligonucleotide disclosed herein.
   13. A chirally controlled oligonucleotide composition comprising a CpG oligonucleotide comprising a strand comprising at least one copy of the CpG region motif T-(*R)-C-(*R)-G-(*R)-T, wherein the CpG oligonucleotide is capable of agonizing an immune response in the human.
   14. A chirally controlled oligonucleotide composition comprising a CpG oligonucleotide comprising a strand comprising at least one copy of the CpG region motif T-(*R)-C-(*R)-G-(*R)-T-(*R)-Py, wherein the CpG oligonucleotide is capable of agonizing an immune response in the human.
   15. A chirally controlled oligonucleotide composition comprising a CpG oligonucleotide comprising a strand comprising at least two non-adjacent copies of the CpG region motif of N₁-(*R)-C-(*R)-G-(*R)-N₂, wherein at least one phosphorothioate between the CpG region motifs is in the Sp conformation, and wherein the CpG oligonucleotide is capable of agonizing an immune response in the human.
   16. A chirally controlled oligonucleotide composition comprising a CpG oligonucleotide comprising a strand comprising at least one copy of the CpG region motif T-(*S)-C-(*S)-G-(*S)-T-(*S)-T, wherein the CpG oligonucleotide is capable of agonizing an immune response in the human.
   17. A chirally controlled oligonucleotide composition comprising a CpG oligonucleotide comprising a strand comprising at least one copy of the CpG region motif N₁-(*R/S)-C-(*R/S)-G-(*R/S)-N₂, wherein the CpG oligonucleotide is capable of agonizing an immune response in the human.
   18. A chirally controlled oligonucleotide composition comprising a CpG oligonucleotide comprising a strand comprising at least one copy of the CpG region motif N₁-(*R/S)-C-(*R/S)-G-(*R/S)-N₂, wherein at least one (*R/S) is (*R) and at least one (*R/S) is (*S), wherein the CpG oligonucleotide is capable of agonizing an immune response in the human.
   19. A chirally controlled oligonucleotide composition comprising a CpG oligonucleotide comprising a strand comprising at least one copy of the CpG region motif N₁-(*R/S)-C-(*R/S)-G-(*R/S)-N₂, wherein at least one (*R/S) is (*R) and at least one (*R/S) is (*S), and wherein C is unmethylated, wherein the CpG oligonucleotide is capable of agonizing an immune response in the human.
   20. A chirally controlled oligonucleotide composition comprising a CpG oligonucleotide comprising a strand comprising at least one copy of the CpG region motif N₁-(*R)-C-(*R)-G-(*S)-N₂, wherein the CpG oligonucleotide is capable of agonizing an immune response in the human.
   21. A chirally controlled oligonucleotide composition comprising a CpG oligonucleotide comprising a strand comprising at least one copy of the CpG region motif N₁-(*R)-C-(*S)-G-(*S)-N₂, wherein the CpG oligonucleotide is capable of agonizing an immune response in the human.
   22. A chirally controlled oligonucleotide composition comprising a CpG oligonucleotide comprising a strand comprising at least one copy of the CpG region motif N₁-(*R)-C-(*S)-G-(*R)-N₂, wherein the CpG oligonucleotide is capable of agonizing an immune response in the human.
   23. A chirally controlled oligonucleotide composition comprising a CpG oligonucleotide comprising a strand comprising at least one copy of the CpG region motif N₁-(*S)-C-(*R)-G-(*S)-N₂, wherein the CpG oligonucleotide is capable of agonizing an immune response in the human.
   24. A chirally controlled oligonucleotide composition comprising a CpG oligonucleotide comprising a strand comprising at least one copy of the CpG region motif N₁-(*S)-C-(*R)-G-(*R)-N₂, wherein the CpG oligonucleotide is capable of agonizing an immune response in the human.
   25. A chirally controlled oligonucleotide composition comprising a CpG oligonucleotide comprising a strand comprising at least one copy of the CpG region motif N₁-(*S)-C-(*S)-G-(*R)-N₂, wherein the CpG oligonucleotide is capable of agonizing an immune response in the human.
   26. A chirally controlled oligonucleotide composition comprising a CpG oligonucleotide comprising a strand comprising at least one copy of the CpG region motif Py-(*R/S)-C-(*R/S)-G-(*R/S)-Py, wherein at least one (*R/S) is (*R) and at least one (*R/S) is (*S), and wherein C is unmethylated, wherein the CpG oligonucleotide is capable of agonizing an immune response in the human.
   27. A chirally controlled oligonucleotide composition comprising a CpG oligonucleotide comprising a strand comprising at least one copy of the CpG region motif m5C-(*R)-m5C-(*R)-G-(*R)-N₁, where all the nucleosides are 2′-MOE, wherein the CpG oligonucleotide is capable of agonizing an immune response in the human.
   28. A chirally controlled oligonucleotide composition comprising a CpG oligonucleotide comprising a strand comprising at least one copy of the CpG region motif m5C-(*R)-m5C-(*R)-G-(*R)-Py, where all the nucleosides are 2′-MOE, wherein the CpG oligonucleotide is capable of agonizing an immune response in the human.
   29. A chirally controlled oligonucleotide composition comprising a CpG oligonucleotide comprising a strand comprising at least one copy of the CpG region motif N₁-(*R)-m5C-(*R)-G-(*R)-N₂, wherein N₁ is methylated or not methylated, and all the nucleosides are 2′-MOE, wherein the CpG oligonucleotide is capable of agonizing an immune response in the human.
   30. A chirally controlled oligonucleotide composition comprising a CpG oligonucleotide comprising a strand comprising at least one copy of the CpG region motif N₁-(*R)-m5C-(*R)-G-(*R)-Py, wherein N₁ is methylated or not methylated, and all the nucleosides are 2′-MOE, wherein the CpG oligonucleotide is capable of agonizing an immune response in the human.
   31. A chirally controlled oligonucleotide composition comprising a CpG oligonucleotide comprising a strand comprising at least one copy of the CpG region motif N₁-(*R/S)-m5C-(*R/S)-G-(*R/S)-N₂, wherein at least 2 of the (*R/S) are (*R), all the nucleosides are 2′-MOE, and N₁ and N₂ are methylated or not methylated, wherein the CpG oligonucleotide is capable of agonizing an immune response in the human.
   32. A chirally controlled oligonucleotide composition comprising a CpG oligonucleotide comprising a strand comprising at least one copy of the CpG region motif N₁-(*R/S)-m5C-(*R/S)-G-(*R/S)-N₂, wherein at least 2 of the (*R/S) are (*R), all the nucleosides are 2′-MOE; and N₁ and N₂ are methylated or not methylated, wherein the CpG oligonucleotide is capable of agonizing an immune response in the human.
   33. A chirally controlled oligonucleotide composition comprising a CpG oligonucleotide comprising a strand comprising at least one copy of the CpG region motif N₁-(*S)-[C]-(*R)-[G]-(*S)-N₂, where N₁ is 2′H, 2′-MOE or 2′-OMe; [C] is C, m5C, 2′-MOE C, or 2′-MOE m5C; [G] is G, 2′-Ome G, or 2′-MOE G; and N₂ is 2′H, 2′-MOE or 2′-OMe, wherein the CpG oligonucleotide is capable of antagonizing an immune response in the human.
   34. A chirally controlled oligonucleotide composition comprising a CpG oligonucleotide comprising a strand comprising at least one copy of the CpG region motif N₁-(*S)-[C]-(*R)-[G]-(*S)-N₂, where N₁ is 2′H; [C] is C, m5C, 2′-MOE C, or 2′-MOE m5C; [G] is G, 2′-Ome G, or 2′-MOE G; and N₂ is 2′H, wherein the CpG oligonucleotide is capable of antagonizing an immune response in the human.
   35. A chirally controlled oligonucleotide composition comprising a CpG oligonucleotide comprising a strand comprising at least one copy of the CpG region motif N₁-(*R)-[C]-(*R)-[G]-(*R)-Py, where N₁ and Py are 2′H, 2′-MOE or 2′OMe; and [C] is C or 2′-MOE C; and [G] is G or 2′-MOE G; and Py is 2′-H or 2′-MOE, wherein the CpG oligonucleotide is capable of antagonizing an immune response in the human.
   36. A chirally controlled oligonucleotide composition comprising a CpG oligonucleotide comprising a strand comprising at least one copy of the CpG region motif N₁-(*R)-[C]-(*R)-[G]-(*R)-N₂, where N₁ and N₂ are 2′H, 2′-MOE or 2′OMe; and [C] is 2′-MOE m5C; N₂ is 2′-H or 2′-MOE, wherein the CpG oligonucleotide is capable of antagonizing an immune response in the human.
   37. A chirally controlled oligonucleotide composition comprising a CpG oligonucleotide comprising a strand comprising at least one copy of the CpG region motif Py-(*R)-C-(*R)-G-(*R)-Py, wherein the CpG oligonucleotide is capable of antagonizing an immune response in the human.
   38. A chirally controlled oligonucleotide composition comprising a CpG oligonucleotide comprising a strand comprising at least one copy of the CpG region motif Py-(*R)-C-(*R)-G-(*R)-Py, wherein the CpG oligonucleotide is capable of antagonizing an immune response in the human.
   39. A chirally controlled oligonucleotide composition comprising a CpG oligonucleotide comprising a strand comprising at least one copy of the CpG region motif Py-(*S)-C-(*R)-G-(*S)-Py.
   40. A chirally controlled oligonucleotide composition comprising a CpG oligonucleotide comprising a strand comprising at least one copy of the CpG region motif Py-(*S)-C-(*S)-G-(*S)-Py, wherein the CpG oligonucleotide is capable of antagonizing an immune response in the human.
   41. A chirally controlled oligonucleotide composition comprising a CpG oligonucleotide comprising a strand comprising at least one copy of the CpG region motif Py-(*R)-[C]-(*R)-[G]-(*R)-Py, where [C] is 2′-MOE C; and [G] is 2′-MOE G, wherein the CpG oligonucleotide is capable of antagonizing an immune response in the human.
   42. A chirally controlled oligonucleotide composition comprising a CpG oligonucleotide comprising a strand comprising at least one copy of the CpG region motif Py-(*R)-[C]-(*R)-[G]-(*S)-Py, where [C] is 2′-MOE C; and [G] is 2′-MOE G, wherein the CpG oligonucleotide is capable of antagonizing an immune response in the human.
   43. A chirally controlled oligonucleotide composition comprising a CpG oligonucleotide comprising a strand comprising at least one copy of the CpG region motif Py-(*R)-[C]-(*R)-G-(*R)-Py, where [C] is C, 2′-OMe m5C, or 2′-MOE C, wherein the CpG oligonucleotide is capable of antagonizing an immune response in the human.
   44. A chirally controlled oligonucleotide composition comprising a CpG oligonucleotide comprising a strand comprising at least one copy of the CpG region motif Py-(*R)-[C]-(*R)-[G]-(*R)-N₁, where [C] is 2′-OMe m5C, and [G] is 2′-OMe G, and N₁ is 2′-OMe, wherein the CpG oligonucleotide is capable of antagonizing an immune response in the human.
   45. A chirally controlled oligonucleotide composition comprising a CpG oligonucleotide comprising a strand comprising at least one copy of the CpG region motif Py-(*R)-[C]-(*R)-[G]-(*R)-Py, where [C] is 2′-OMe m5C, and [G] is 2′-OMe G, wherein the CpG oligonucleotide is capable of antagonizing an immune response in the human.
   46. A chirally controlled oligonucleotide composition comprising a CpG oligonucleotide comprising a strand comprising at least one copy of the CpG region motif Py-(*R)-[C]-(*R)-[G]-(*R)-Py, where [C] is 2′-OMe C and [G] is 2′-OMe G, wherein the CpG oligonucleotide is capable of antagonizing an immune response in the human.
   47. A chirally controlled oligonucleotide composition comprising a CpG oligonucleotide comprising a strand comprising at least one copy of the CpG region motif Py-(*S)-[C]-(*R)-[G]-(*S)-Py, where [C] is 2′-MOE C and [G] is 2′-MOE G, wherein the CpG oligonucleotide is capable of antagonizing an immune response in the human.
   48. A chirally controlled oligonucleotide composition comprising a CpG oligonucleotide comprising a strand comprising at least one copy of the CpG region motif Py-(*R)-m5C-(*R)-G-(*R)-Py, wherein the CpG oligonucleotide is capable of antagonizing an immune response in the human.
   49. A chirally controlled oligonucleotide composition comprising a CpG oligonucleotide comprising a strand comprising at least one copy of the CpG region motif Py-(*R)-m5C-(*R)-G-(*R)-Py, wherein the CpG oligonucleotide is capable of antagonizing an immune response in the human.
   50. A chirally controlled oligonucleotide composition comprising a CpG oligonucleotide comprising a strand comprising at least one copy of the CpG region motif Py-(*S)-m5C-(*R)-G-(*S)-Py, wherein the CpG oligonucleotide is capable of antagonizing an immune response in the human.
   51. A chirally controlled oligonucleotide composition comprising a CpG oligonucleotide comprising a strand comprising at least one copy of the CpG region motif Py-(*S)-[C]-(*R)-[G]-(*S)-Py, where [C] is 2′-MOE m5C and [G] is 2′-MOE G, wherein the CpG oligonucleotide is capable of antagonizing an immune response in the human.
   52. A chirally controlled oligonucleotide composition comprising a CpG oligonucleotide comprising a strand comprising at least one copy of the CpG region motif Py-(*S)-[C]-(*R)-[G]-(*S)-Py, where [C] is 2′-OMe m5C and [G] is 2′-OMe G, wherein the CpG oligonucleotide is capable of antagonizing an immune response in the human.
   53. A chirally controlled oligonucleotide composition comprising a CpG oligonucleotide comprising a strand comprising at least one copy of the CpG region motif Py-(*S)-[C]-(*R)-[G]-(*S)-Py, where [C] is 2′-OMe C and [G] is 2′-OMe G, wherein the CpG oligonucleotide is capable of antagonizing an immune response in the human.
   54. A chirally controlled oligonucleotide composition comprising a CpG oligonucleotide comprising a strand comprising at least one copy of the CpG region motif Py-(*R)-[C]-(*R)-[G]-(*R)-Py, where both [C] and [G] are 2′-modified, wherein the CpG oligonucleotide is capable of antagonizing an immune response in the human.
   55. A chirally controlled oligonucleotide composition comprising a CpG oligonucleotide comprising a strand comprising at least one copy of the CpG region motif N₁-(*R)-[C]-(*R)-[G]-(*R)-N₂, where both [C] and [G] are 2′-modified, wherein the CpG oligonucleotide is capable of antagonizing an immune response in the human.
   56. A chirally controlled oligonucleotide composition comprising a CpG oligonucleotide comprising a strand comprising at least one copy of the CpG region motif T-(*R)-C-(*R)-G-(*R)-T.
   57. A chirally controlled oligonucleotide composition comprising a CpG oligonucleotide comprising a strand comprising at least one copy of the CpG region motif T-(*R)-C-(*R)-G-(*R)-T-(*R)-Py.
   58. A chirally controlled oligonucleotide composition comprising a CpG oligonucleotide comprising a strand comprising at least two non-adjacent copies of the CpG region motif of N₁-(*R)-C-(*R)-G-(*R)-N₂, wherein at least one phosphorothioate between the CpG region motifs is in the Sp conformation.
   59. A chirally controlled oligonucleotide composition comprising a CpG oligonucleotide comprising a strand comprising at least one copy of the CpG region motif T-(*S)-C-(*S)-G-(*S)-T-(*S)-T.
   60. A chirally controlled oligonucleotide composition comprising a CpG oligonucleotide comprising a strand comprising at least one copy of the CpG region motif N₁-(*R/S)-C-(*R/S)-G-(*R/S)-N₂.
   61. A chirally controlled oligonucleotide composition comprising a CpG oligonucleotide comprising a strand comprising at least one copy of the CpG region motif N₁-(*R/S)-C-(*R/S)-G-(*R/S)-N₂, wherein at least one (*R/S) is (*R) and at least one (*R/S) is (*S).
   62. A chirally controlled oligonucleotide composition comprising a CpG oligonucleotide comprising a strand comprising at least one copy of the CpG region motif N₁-(*R/S)-C-(*R/S)-G-(*R/S)-N₂, wherein at least one (*R/S) is (*R) and at least one (*R/S) is (*S), and wherein C is unmethylated.
   63. A chirally controlled oligonucleotide composition comprising a CpG oligonucleotide comprising a strand comprising at least one copy of the CpG region motif N₁-(*R)-C-(*R)-G-(*S)-N₂.
   64. A chirally controlled oligonucleotide composition comprising a CpG oligonucleotide comprising a strand comprising at least one copy of the CpG region motif N₁-(*R)-C-(*S)-G-(*S)-N₂.
   65. A chirally controlled oligonucleotide composition comprising a CpG oligonucleotide comprising a strand comprising at least one copy of the CpG region motif N₁-(*R)-C-(*S)-G-(*R)-N₂.
   66. A chirally controlled oligonucleotide composition comprising a CpG oligonucleotide comprising a strand comprising at least one copy of the CpG region motif N₁-(*S)-C-(*R)-G-(*S)-N₂.
   67. A chirally controlled oligonucleotide composition comprising a CpG oligonucleotide comprising a strand comprising at least one copy of the CpG region motif N₁-(*S)-C-(*R)-G-(*R)-N₂.
   68. A chirally controlled oligonucleotide composition comprising a CpG oligonucleotide comprising a strand comprising at least one copy of the CpG region motif N₁-(*S)-C-(*S)-G-(*R)-N₂.
   69. A chirally controlled oligonucleotide composition comprising a CpG oligonucleotide comprising a strand comprising at least one copy of the CpG region motif Py-(*R/S)-C-(*R/S)-G-(*R/S)-Py, wherein at least one (*R/S) is (*R) and at least one (*R/S) is (*S), and wherein C is unmethylated.
   70. A chirally controlled oligonucleotide composition comprising a CpG oligonucleotide comprising a strand comprising at least one copy of the CpG region motif m5C-(*R)-m5C-(*R)-G-(*R)-N₁, where all the nucleosides are 2′-MOE.
   71. A chirally controlled oligonucleotide composition comprising a CpG oligonucleotide comprising a strand comprising at least one copy of the CpG region motif m5C-(*R)-m5C-(*R)-G-(*R)-Py, where all the nucleosides are 2′-MOE.
   72. A chirally controlled oligonucleotide composition comprising a CpG oligonucleotide comprising a strand comprising at least one copy of the CpG region motif N₁-(*R)-m5C-(*R)-G-(*R)-N₂, wherein N₁ is methylated or not methylated, and all the nucleosides are 2′-MOE.
   73. A chirally controlled oligonucleotide composition comprising a CpG oligonucleotide comprising a strand comprising at least one copy of the CpG region motif N₁-(*R)-m5C-(*R)-G-(*R)-Py, wherein N₁ is methylated or not methylated, and all the nucleosides are 2′-MOE.
   74. A chirally controlled oligonucleotide composition comprising a CpG oligonucleotide comprising a strand comprising at least one copy of the CpG region motif N₁-(*R/S)-m5C-(*R/S)-G-(*R/S)-N₂, wherein at least 2 of the (*R/S) are (*R), all the nucleosides are 2′-MOE, and N₁ and N₂ are methylated or not methylated.
   75. A chirally controlled oligonucleotide composition comprising a CpG oligonucleotide comprising a strand comprising at least one copy of the CpG region motif N₁-(*R/S)-m5C-(*R/S)-G-(*R/S)-N₂, wherein at least 2 of the (*R/S) are (*R), all the nucleosides are 2′-MOE; and N₁ and N₂ are methylated or not methylated.
   76. A chirally controlled oligonucleotide composition comprising a CpG oligonucleotide comprising a strand comprising at least one copy of the CpG region motif N₁-(*S)-[C]-(*R)-[G]-(*S)-N₂, where N₁ is 2′H, 2′-MOE or 2′-OMe; [C] is C, m5C, 2′-MOE C, or 2′-MOE m5C; [G] is G, 2′-Ome G, or 2′-MOE G; and N₂ is 2′H, 2′-MOE or 2′-OMe.
   77. A chirally controlled oligonucleotide composition comprising a CpG oligonucleotide comprising a strand comprising at least one copy of the CpG region motif N₁-(*S)-[C]-(*R)-[G]-(*S)-N₂, where N₁ is 2′H; [C] is C, m5C, 2′-MOE C, or 2′-MOE m5C; [G] is G, 2′-Ome G, or 2′-MOE G; and N₂ is 2′H.
   78. A chirally controlled oligonucleotide composition comprising a CpG oligonucleotide comprising a strand comprising at least one copy of the CpG region motif N₁-(*R)-[C]-(*R)-[G]-(*R)-Py, where N₁ and Py are 2′H, 2′-MOE or 2′OMe; and [C] is C or 2′-MOE C; and [G] is G or 2′-MOE G; and Py is 2′-H or 2′-MOE.
   79. A chirally controlled oligonucleotide composition comprising a CpG oligonucleotide comprising a strand comprising at least one copy of the CpG region motif N₁-(*R)-[C]-(*R)-[G]-(*R)-N₂, where N₁ and N₂ are 2′H, 2′-MOE or 2′OMe; and [C] is 2′-MOE m5C; N₂ is 2′-H or 2′-MOE.
   80. A chirally controlled oligonucleotide composition comprising a CpG oligonucleotide comprising a strand comprising at least one copy of the CpG region motif Py-(*R)-C-(*R)-G-(*R)-Py.
   81. A chirally controlled oligonucleotide composition comprising a CpG oligonucleotide comprising a strand comprising at least one copy of the CpG region motif Py-(*R)-C-(*R)-G-(*R)-Py.
   82. A chirally controlled oligonucleotide composition comprising a CpG oligonucleotide comprising a strand comprising at least one copy of the CpG region motif Py-(*S)-C-(*R)-G-(*S)-Py.
   83. A chirally controlled oligonucleotide composition comprising a CpG oligonucleotide comprising a strand comprising at least one copy of the CpG region motif Py-(*S)-C-(*S)-G-(*S)-Py.
   84. A chirally controlled oligonucleotide composition comprising a CpG oligonucleotide comprising a strand comprising at least one copy of the CpG region motif Py-(*R)-[C]-(*R)-[G]-(*R)-Py, where [C] is 2′-MOE C; and [G] is 2′-MOE G.
   85. A chirally controlled oligonucleotide composition comprising a CpG oligonucleotide comprising a strand comprising at least one copy of the CpG region motif Py-(*R)-[C]-(*R)-[G]-(*S)-Py, where [C] is 2′-MOE C; and [G] is 2′-MOE G.
   86. A chirally controlled oligonucleotide composition comprising a CpG oligonucleotide comprising a strand comprising at least one copy of the CpG region motif Py-(*R)-[C]-(*R)-G-(*R)-Py, where [C] is C, 2′-OMe m5C, or 2′-MOE C.
   87. A chirally controlled oligonucleotide composition comprising a CpG oligonucleotide comprising a strand comprising at least one copy of the CpG region motif Py-(*R)-[C]-(*R)-[G]-(*R)-N₁, where [C] is 2′-OMe m5C, and [G] is 2′-OMe G, and N₁ is 2′-OMe.
   88. A chirally controlled oligonucleotide composition comprising a CpG oligonucleotide comprising a strand comprising at least one copy of the CpG region motif Py-(*R)-[C]-(*R)-[G]-(*R)-Py, where [C] is 2′-OMe m5C, and [G] is 2′-OMe G.
   89. A chirally controlled oligonucleotide composition comprising a CpG oligonucleotide comprising a strand comprising at least one copy of the CpG region motif Py-(*R)-[C]-(*R)-[G]-(*R)-Py, where [C] is 2′-OMe C and [G] is 2′-OMe G.
   90. A chirally controlled oligonucleotide composition comprising a CpG oligonucleotide comprising a strand comprising at least one copy of the CpG region motif Py-(*S)-[C]-(*R)-[G]-(*S)-Py, where [C] is 2′-MOE C and [G] is 2′-MOE G.
   91. A chirally controlled oligonucleotide composition comprising a CpG oligonucleotide comprising a strand comprising at least one copy of the CpG region motif Py-(*R)-m5C-(*R)-G-(*R)-Py.
   92. A chirally controlled oligonucleotide composition comprising a CpG oligonucleotide comprising a strand comprising at least one copy of the CpG region motif Py-(*R)-m5C-(*R)-G-(*R)-Py.
   93. A chirally controlled oligonucleotide composition comprising a CpG oligonucleotide comprising a strand comprising at least one copy of the CpG region motif Py-(*S)-m5C-(*R)-G-(*S)-Py.
   94. A chirally controlled oligonucleotide composition comprising a CpG oligonucleotide comprising a strand comprising at least one copy of the CpG region motif Py-(*S)-[C]-(*R)-[G]-(*S)-Py, where [C] is 2′-MOE m5C and [G] is 2′-MOE G.
   95. A chirally controlled oligonucleotide composition comprising a CpG oligonucleotide comprising a strand comprising at least one copy of the CpG region motif Py-(*S)-[C]-(*R)-[G]-(*S)-Py, where [C] is 2′-OMe m5C and [G] is 2′-OMe G.
   96. A chirally controlled oligonucleotide composition comprising a CpG oligonucleotide comprising a strand comprising at least one copy of the CpG region motif Py-(*S)-[C]-(*R)-[G]-(*S)-Py, where [C] is 2′-OMe C and [G] is 2′-OMe G.
   97. A chirally controlled oligonucleotide composition comprising a CpG oligonucleotide comprising a strand comprising at least one copy of the CpG region motif Py-(*R)-[C]-(*R)-[G]-(*R)-Py, where both [C] and [G] are 2′-modified.
   98. A chirally controlled oligonucleotide composition comprising a CpG oligonucleotide comprising a strand comprising at least one copy of the CpG region motif N₁-(*R)-[C]-(*R)-[G]-(*R)-N₂, where both [C] and [G] are 2′-modified.
   98a. The composition of any one of the preceding embodiments, wherein more than above 50%, 55%, 60%, 65%, 70%, 75%, 80%, 85%, 90%, or 95% of chiral internucleotidic linkages of the oligonucleotides are Sp.
   98b. The composition of any one of embodiments 1-98a, wherein more than above 50%, 55%, 60%, 65%, 70%, 75%, 80%, 85%, 90%, or 95% of chiral internucleotidic linkages of the oligonucleotides are Rp.
   98c. The composition of any one of the preceding embodiments, wherein oligonucleotides of the composition comprise a CpG of —C-Rp-G-.
   98d. The composition of any one of the preceding embodiments, wherein oligonucleotides of the composition comprise a CpG of Sp-C-Rp-G-Sp.
   98e. The composition of any one of the preceding embodiments, wherein oligonucleotides of the composition comprise a CpG of Rp-CpG-Rp.
   98f. The composition of any one of the preceding embodiments, wherein oligonucleotides of the composition comprise a CpG of Rp-C-Rp-G-Rp.
   98g. The composition of any one of the preceding embodiments, wherein oligonucleotides of the composition comprise a CpG of —CpG-Sp.
   98h. The composition of any one of the preceding embodiments, wherein oligonucleotides of the composition comprise a CpG of Rp-CpG-.
   98i. The composition of any one of the preceding embodiments, wherein oligonucleotides of the composition comprise a CpG of Rp-CpG-Sp.
   98j. The composition of any one of the preceding embodiments, wherein oligonucleotides of the composition comprise a CpG of Rp-C-Rp-G-Sp.
   98k. The composition of any one of the preceding embodiments, wherein oligonucleotides of the composition comprise a CpG of Rp-C-Sp-G-Sp.
   98l. The composition of any one of the preceding embodiments, wherein oligonucleotides of the composition comprise a CpG of —CpG-Rp.
   98m. The composition of any one of the preceding embodiments, wherein oligonucleotides of the composition comprise a CpG of Rp-CpG-.
   98n. The composition of any one of the preceding embodiments, wherein oligonucleotides of the composition comprise a CpG of Rp-CpG-Rp.
   98o. The composition of any one of the preceding embodiments, wherein oligonucleotides of the composition comprise a CpG of Rp-C-Rp-G-Rp.
   98p. The composition of any one of the preceding embodiments, wherein oligonucleotides of the composition comprise a CpG of Rp-C-Sp-G-Rp.
   98q. The composition of any one of the preceding embodiments, wherein oligonucleotides of the composition comprise one or more modified sugars.
   98r. The composition of any one of the preceding embodiments, wherein the CpG and/or its two neighboring nucleosides contain one or more modified sugars.
   98s. The composition of any one of the preceding embodiments, wherein the CpG contain one or more modified sugars.
   98t. The composition of any one of the preceding embodiments, wherein the C of the CpG contains a modified sugar.
   98u. The composition of any one of the preceding embodiments, wherein the CpG and/or its two neighboring nucleosides do not all contain a modified sugar.
   98v. The composition of any one of the preceding embodiments, wherein the CpG and/or its two neighboring nucleosides do not contain a modified sugar.
   98w. The composition of any one of the preceding embodiments, wherein the CpG does not contain a modified sugar.
   98x. The composition of any one of the preceding embodiments, wherein the C of the CpG does not contain a modified sugar.
   98y. The composition of any one of the preceding embodiments, wherein a modified sugar is 2′-modified.
   98ya. The composition of any one of the preceding embodiments, wherein the 2′-modification is 2′-OR wherein R is optionally substituted C₁₋₆ aliphatic.
   98z. The composition of any one of the preceding embodiments, wherein the 2′-modification is 2′-MOE.
   98aa. The composition of any one of the preceding embodiments, wherein oligonucleotides of the composition comprise one or more modified bases.
   98ab. The composition of any one of the preceding embodiments, wherein the CpG and/or its two neighboring nucleosides contain one or more modified bases.
   98ac. The composition of any one of the preceding embodiments, wherein the CpG contain one or more modified bases.
   98ad. The composition of any one of the preceding embodiments, wherein the C of the CpG contains a modified base.
   98ae. The composition of any one of the preceding embodiments, wherein the CpG and/or its two neighboring nucleosides do not all contain a modified base.
   98af. The composition of any one of the preceding embodiments, wherein the CpG and/or its two neighboring nucleosides do not contain a modified base.
   98ag. The composition of any one of the preceding embodiments, wherein the CpG does not contain a modified base.
   98ah. The composition of any one of the preceding embodiments, wherein the C does not contain a modified base.
   98ai. The composition of any one of the preceding embodiments, wherein the modified base is 5mC.
   99. The composition of any one of the preceding embodiments, wherein at least one internucleotidic linkage has the structure of formula I.
   99a. The composition of any one of the preceding embodiments, wherein at least one internucleotidic linkage is a phosphorodithioate.
   100. The composition of any one of the preceding embodiments, wherein at least one internucleotidic linkage is selected from: phosphorodithioate, phosphoramidate, boranophosphonoate, an amide linker, or a compound offormula (I):

[chemical structure]

where R³ is selected from OH, SH, NH₂, BH₃, CH₃, C₁₋₆ alkyl, C₆₋₁₀ aryl, C₁₋₆ alkoxy and C₆₋₁₀ aryl-oxy, wherein C₁₋₆ alkyl and C₆₋₁₀ aryl are unsubstituted or optionally independently substituted with 1 to 3 groups independently selected from halo, hydroxyl and NH₂, and applicable salts thereof; and R⁴ is selected from 0, 5, NH, or CH₂.
101. The composition of any one of the preceding embodiments, wherein at least one internucleotidic linkage is selected from:

| Symbol | Modified Internucleotidic Linkage |
|---|---|
| s | phosphorothioate [chemical structure] |
| s1 | [chemical structure] |
| s2 | [chemical structure] |
| s3 | [chemical structure] |
| s4 | [chemical structure] |
| s5 | [chemical structure] |
| s6 | [chemical structure] |
| s7 | [chemical structure] |
| s8 | [chemical structure] |
| s9 | [chemical structure] |
| s10 | [chemical structure] |
| s11 | [chemical structure] |
| s12 | [chemical structure] |
| s13 | [chemical structure] |
| s14 | [chemical structure] |
| s15 | [chemical structure] |
| s16 | [chemical structure] |
| s17 | [chemical structure] |
| s18 | [chemical structure] |

102. The composition or method of any one of the preceding embodiments, wherein the oligonucleotide is conjugated to a lipid via a linker.
103. The composition or method of any one of the preceding embodiments, wherein the linker is -L^{LD}-.
104. The composition or method of any one of the preceding embodiments, wherein the linker is -L-.
105. The composition or method of any one of the preceding embodiments, wherein the linker is —NH—(CH2)₆—.
106. The composition or method of any one of the preceding embodiments, wherein the linker is —C(O)—NH—(CH2)₆—P(O)(O—)-.
107. The composition or method of any one of the preceding embodiments, wherein the linker is —C(O)—NH—(CH2)₆—P(O)(S—)-.
108. The composition of embodiment 106 or 107, wherein the lipid is a fatty acid which is connected to the linker through formation of the amide group —C(O)—NH—, and the oligonucleotide is connected to the linker through formation of a phosphate or phosphorothioate linkage between its 5′-OH or 3′-OH with —P(O)(O—)— or —P(O)(S—)— of the linker.
109. The composition of embodiment 106 or 107, wherein the lipid is a fatty acid which is connected to the linker through formation of the amide group —C(O)—NH—, and the oligonucleotide is connected to the linker through formation of a phosphate or phosphorothioate linkage between its 5′-OH with —P(O)(O—)— or —P(O)(S—)— of the linker.
110. The composition of embodiment 106 or 107, wherein the lipid is a fatty acid which is connected to the linker through formation of the amide group —C(O)—NH—, and the oligonucleotide is connected to the linker through formation of a phosphate or phosphorothioate linkage between its 3′-OH with —P(O)(O—)— or —P(O)(S—)— of the linker.
111. The composition of any one of the preceding embodiments, further comprising one or more targeting components.
112. A composition comprising a plurality of compounds having the structure of:

[chemical structure]

or a salt thereof,
[1984] wherein:
[1985] A^{c} is an oligonucleotide chain ([H]_{b}—Ac is an oligonucleotide);
[1986] a is 1-1000;
[1987] b is 1-1000;
[1988] each L^{LD} is independently a linker moiety; and
[1989] each R^{LD} is independently a lipid moiety or a targeting component, wherein at least one R^{LD} is a lipid moiety.
   113. A composition comprising a plurality of compounds having the structure of:

[chemical structure]

or a salt thereof,
[1990] wherein:
[1991] A^{c} is an oligonucleotide chain ([H]_{b}—Ac is an oligonucleotide);
[1992] a is 1-1000;
[1993] b is 1-1000;
[1994] each L^{LD} is independently a covalent bond or an optionally substituted, C1-C₈₀ saturated or partially unsaturated aliphatic group, wherein one or more methylene units are optionally and independently replaced by T^{LD} or an optionally substituted group selected from C₁-C₆alkylene, C₁-C₆ alkenylene, —C≡C—, a C₁-C₆ heteroaliphatic moiety, —C(R′)₂—, —Cy-, —O—, —S—, —S—S—, —N(R′)—, —C(O)—, —C(S)—, —C(NR′)—, —C(O)N(R′)—, —N(R′)C(O)N(R′)—, —N(R′)C(O)—, —N(R′)C(O)O—, —OC(O)N(R′)—, —S(O)—, —S(O)₂—, —S(O)₂N(R′)—, —N(R′)S(O)₂—, —SC(O)—, —C(O)S—, —OC(O)—, and —C(O)O—;
[1995] each R^{LD} is independently an optionally substituted, C₁-C₈₀ saturated or partially unsaturated aliphatic group, wherein one or more methylene units are optionally and independently replaced by an optionally substituted group selected from C₁-C₆ alkylene, C₁-C₆ alkenylene, CEC, a C₁-C₆ heteroaliphatic moiety, —C(R′)₂—, —Cy-, —O—, —S—, —S—S—, —N(R′)—, —C(O)—, —C(S)—, —C(NR′)—, —C(O)N(R′)—, —N(R′)C(O)N(R′)—, —N(R′)C(O)—, —N(R′)C(O)O—, —OC(O)N(R′)—, —S(O)—, —S(O)₂—, —S(O)₂N(R′)—, —N(R′)S(O)₂—, —SC(O)—, —C(O)S—, —OC(O)—, and —C(O)O—;
[1996] T^{LD} has the structure of:

[chemical structure]

[1997] W is O, S or Se;
[1998] each of X, Y and Z is independently —O—, —S—, —N(-L-R¹)—, or L;
[1999] L is a covalent bond or an optionally substituted, linear or branched C₁-C₁₀ alkylene, wherein one or more methylene units of L are optionally and independently replaced by an optionally substituted group selected from C₁-C₆ alkylene, C₁-C₆ alkenylene, —C≡C—, a C₁-C₆ heteroaliphatic moiety, —C(R′)₂—, —Cy-, —O—, —S—, —S—S—, —N(R′)—, —C(O)—, —C(S)—, —C(NR′)—, —C(O)N(R′)—, —N(R′)C(O)N(R′)—, —N(R′)C(O)—, —N(R′)C(O)O—, —OC(O)N(R′)—, —S(O)—, —S(O)₂—, —S(O)₂N(R′)—, —N(R′)S(O)₂——SC(O)—, —C(O)S—, —OC(O)—, and —C(O)O—;
[2000] R¹ is halogen, R, or an optionally substituted C₁-C₅₀ aliphatic wherein one or more methylene units are optionally and independently replaced by an optionally substituted group selected from C₁-C₆ alkylene, C₁-C₆ alkenylene, CEC, a C₁-C₆ heteroaliphatic moiety, —C(R′)₂—, —Cy-, —O—, —S—, —S—S—, —N(R′)—, —C(O)—, —C(S)—, —C(NR′)—, —C(O)N(R′)—, —N(R′)C(O)N(R′)—, —N(R′)C(O)—, —N(R′)C(O)O—, —OC(O)N(R′)—, —S(O)—, —S(O)₂—, —S(O)₂N(R′)—, —N(R′)S(O)₂——SC(O)—, —C(O)S—, —OC(O)—, and —C(O)O—
[2001] each R′ is independently —R, —C(O)R, —CO₂R, or —SO₂R, or:
   [2002] two R′ are taken together with their intervening atoms to form an optionally substituted aryl, carbocyclic, heterocyclic, or heteroaryl ring;
[2003] —Cy- is an optionally substituted bivalent ring selected from phenylene, carbocyclylene, arylene, heteroarylene, and heterocyclylene; and
[2004] each R is independently hydrogen, or an optionally substituted group selected from C₁-C₆ aliphatic, carbocyclyl, aryl, heteroaryl, and heterocyclyl.
   114. The composition of any one of embodiments 112-113, wherein A^{c} is an oligonucleotide chain of any oligonucleotide of any of the Tables ([H]_{b}—Ac is an oligonucleotide of any of the Tables).
   115. The composition or method of any one of embodiments 1-111, wherein the composition is a composition of any one of embodiments 112-114.
   116. The composition or method of any one of embodiments 112-115, wherein the oligonucleotides or oligonucleotides have the structure of Ac—[-L^{LD}-(R^{LD})a]_{b}.
   117. The composition or method of any one of embodiments 112-115, wherein the oligonucleotides or oligonucleotides have the structure of [(Ac)ₐ-L^{LD}]b-R^{LD}
   118. The composition or method of any one of embodiments 112-117, wherein L^{LD}, R^{LD}combinations of L^{LD} and R^{LD}, or -[-L^{LD}-(R^{LD})a]_{b} comprises one or more lipid moieties.
   119. The composition or method of any one of embodiments 112-117, wherein -[-L^{LD}-(R^{LD})a]_{b} comprises one or more lipid moieties.
   120. The composition or method of any one of embodiments 112-118, wherein R^{LD} comprises one or more lipid moieties.
   121. The composition or method of any one of embodiments 112-117, wherein L^{LD}, R^{LD}combinations of L^{LD} and R^{LD}, or -[-L^{LD}-(R^{LD})a]_{b} comprises one or more targeting components.
   122. The composition or method of any one of embodiments 112-117, wherein -[-L^{LD}-(R^{LD})a]_{b} comprises one or more targeting components.
   123. The composition or method of any one of embodiments 112-118, wherein R^{LD} comprises one or more targeting components.
   124. The composition or method of any one of embodiments 112-123, wherein b is 1.
   125. The composition or method of any one of embodiments 112-124, wherein a is 1.
   126. The composition or method of any one of embodiments 112-125, wherein A^{c} comprises one or more modified base, sugar, or internucleotidic linkage moieties.
   127. The composition or method of any one of embodiments 112-126, wherein A^{c} comprises one or more chiral internucleotidic linkages.
   128. The composition or method of any one of embodiments 112-127, wherein A^{c} comprises one or more chiral internucleotidic linkages, and each chiral internucleotidic linkage of Ac is chirally controlled.
   129. The composition or method of any one of embodiments 112-128, wherein oligonucleotides having the structure of A^{c}-[-L^{LD}-(R^{LD})a]_{b}, or [(A^{c})ₐ-L^{LD}]b-R^{LD}, are of a particular type defined by the 1) base sequence; 2) pattern of backbone linkages; 3) pattern of backbone chiral centers; and 4) pattern of backbone phosphorus modifications of Ac.
   130. The composition or method of any one of embodiments 112-125, wherein A^{c} is the oligonucleotide chain of any one of the preceding embodiments.
   131. The composition or method of any one of embodiments 112-130, wherein A^{c} is an oligonucleotide of any one of the preceding embodiments, connecting to L^{LD} through a hydroxyl group of a sugar moiety (—O—).
   132. The composition or method of any one of embodiments 112-131, wherein A^{c} is an oligonucleotide of any one of the preceding embodiments, connecting to L^{LD} through its 5′-O—.
   133. The composition or method of any one of embodiments 112-130, wherein A^{c} is an oligonucleotide of any one of the preceding embodiments, connecting to L^{LD} through a nucleobase.
   134. The composition or method of any one of embodiments 112-130, wherein A^{c} is an oligonucleotide of any one of the preceding embodiments, connecting to L^{LD} through an internucleotidic linkage.
   135. The composition or method of any one of embodiments 112-132, wherein A^{c} is an oligonucleotide selected from any of the Tables and connected to L^{LD} and R^{LD} ([H]_{b}—Ac is an oligonucleotide selected from any of the Tables).
   136. The composition or method of any one of embodiments 112-132, wherein A^{c} is WV-887 connected to L^{LD} and R^{LD} ([H]_{b}—Ac is WV-887).
   137. The composition or method of any one of embodiments 112-132, wherein A^{c} is WV-892 connected to L^{LD} and R^{LD}
   138. The composition or method of any one of embodiments 112-132, wherein A^{c} is WV-896 connected to L^{LD} and R^{LD}
   139. The composition or method of any one of embodiments 112-132, wherein A^{c} is WV-1714 connected to L^{LD} and R^{LD}
   140. The composition or method of any one of embodiments 112-132, wherein A^{c} is WV-2444 connected to L^{LD} and R^{LD}
   141. The composition or method of any one of embodiments 112-132, wherein A^{c} is WV-2445 connected to L^{LD} and R^{LD}
   142. The composition or method of any one of embodiments 112-132, wherein A^{c} is WV-2526 connected to L^{LD} and R^{LD}
   143. The composition or method of any one of embodiments 112-132, wherein A^{c} is WV-2527 connected to L^{LD} and R^{LD}
   144. The composition or method of any one of embodiments 112-132, wherein A^{c} is WV-2528 connected to L^{LD} and R^{LD}
   145. The composition or method of any one of embodiments 112-132, wherein A^{c} is WV-2530 connected to L^{LD} and R^{LD}
   146. The composition or method of any one of embodiments 112-132, wherein A^{c} is WV-2531 connected to L^{LD} and R^{LD}
   147. The composition or method of any one of embodiments 112-132, wherein A^{c} is WV-2578 connected to L^{LD} and R^{LD}
   148. The composition or method of any one of embodiments 112-132, wherein A^{c} is WV-2580 connected to L^{LD} and R^{LD}
   149. The composition or method of any one of embodiments 112-132, wherein A^{c} is WV-2587 connected to L^{LD} and R^{LD}
   150. The composition or method of any one of embodiments 112-132, wherein A^{c} is WV-3047 connected to L^{LD} and R^{LD}
   151. The composition or method of any one of embodiments 112-132, wherein A^{c} is WV-3152 connected to L^{LD} and R^{LD}
   152. The composition or method of any one of embodiments 112-132, wherein A^{c} is WV-3472 connected to L^{LD} and R^{LD}
   153. The composition or method of any one of embodiments 112-132, wherein A^{c} is WV-3473 connected to L^{LD} and R^{LD}
   154. The composition or method of any one of embodiments 112-132, wherein A^{c} is WV-3507 connected to L^{LD} and R^{LD}
   155. The composition or method of any one of embodiments 112-132, wherein A^{c} is WV-3508 connected to L^{LD} and R^{LD}
   156. The composition or method of any one of embodiments 112-132, wherein A^{c} is WV-3509 connected to L^{LD} and R^{LD}
   157. The composition or method of any one of embodiments 112-132, wherein A^{c} is WV-3510 connected to L^{LD} and R^{LD}
   158. The composition or method of any one of embodiments 112-132, wherein A^{c} is WV-3511 connected to L^{LD} and R^{LD}
   159. The composition or method of any one of embodiments 112-132, wherein A^{c} is WV-3512 connected to L^{LD} and R^{LD}
   160. The composition or method of any one of embodiments 112-132, wherein A^{c} is WV-3513 connected to L^{LD} and R^{LD}
   161. The composition or method of any one of embodiments 112-132, wherein A^{c} is WV-3514 connected to L^{LD} and R^{LD}
   162. The composition or method of any one of embodiments 112-132, wherein A^{c} is WV-3515 connected to L^{LD} and R^{LD}
   163. The composition or method of any one of embodiments 112-162, wherein L^{LD} is an optionally substituted, C₁-C₁₀ saturated or partially unsaturated aliphatic group, wherein one or more methylene units are optionally and independently replaced by T^{LD} or an optionally substituted group selected from C₁-C₆ alkylene, C₁-C₆ alkenylene, C≡C, a C₁-C₆ heteroaliphatic moiety, —C(R′)₂—, —Cy-, —O—, —S—, —S—S—, —N(R′)—, —C(O)—, —C(S)—, —C(NR′)—, —C(O)N(R′)—, —N(R′)C(O)N(R′)—, —N(R′)C(O)—, —N(R′)C(O)O—, —OC(O)N(R′)—, —S(O)—, —S(O)₂—, —S(O)₂N(R′)—, —N(R′)S(O)₂—, —SC(O)—, —C(O)S—, —OC(O)—, and —C(O)O—.
   164. The composition or method of any one of embodiments 112-162, wherein L^{LD} is an optionally substituted, C₁-C₁₀ saturated or partially unsaturated aliphatic group, wherein one or more methylene units are optionally and independently replaced by an optionally substituted group selected from C₁-C₆ alkylene, C₁-C₆ alkenylene, —C≡C—, —Cy-, —O—, —S—, —N(R′)—, —C(O)—, —C(O)N(R′)—, —N(R′)C(O)N(R′)—, —OC(O)N(R′)—, —S(O)—, —S(O)₂—, —S(O)₂N(R′)—, and —C(O)O—, or T^{LD} wherein W is 0 or S, each of Y and Z is independently —O—, —S—, or -L-.
   165. The composition or method of any one of embodiments 112-162, wherein L^{LD} is an optionally substituted, C₁-C₁₀ saturated or partially unsaturated aliphatic group, wherein one or more methylene units are optionally and independently replaced by an optionally substituted group selected from C₁-C₆ alkylene, C₁-C₆ alkenylene, —C≡C—, —Cy-, —O—, —S—, —N(R′)—, —C(O)—, —C(O)N(R′)—, —N(R′)C(O)N(R′)—, —OC(O)N(R′)—, —S(O)—, —S(O)₂—, —S(O)₂N(R′)—, and —C(O)O—, or T^{LD} wherein W is 0 or S, each of X and Y is independently —O—, —S—, or -L-, and Z is a covalent bond.
   166. The composition or method of any one of embodiments 112-164, wherein L^{LD} connects to a hydroxyl group of Ac.
   167. The composition or method of any one of embodiments 112-164, wherein L^{LD} connects to 5′-OH of Ac.
   168. The composition or method of any one of embodiments 112-164, wherein L^{LD} connects to 3′-OH of Ac.
   169. The composition or method of any one of the preceding embodiments, wherein each R′ is independently —R, —C(O)R, —CO₂R, or —SO₂R, or: two R′ are taken together with their intervening atoms to form an optionally substituted C₃-C₁₄ monocyclic, bicyclic or polycyclic aryl, carbocyclic, heterocyclic, or heteroaryl ring having 0-10 heteroatoms.
   170. The composition or method of any one of the preceding embodiments, wherein —Cy- is an optionally substituted bivalent ring selected from C₃-C₁₄ monocyclic, bicyclic or polycyclic carbocyclylene, arylene, heteroarylene, and heterocyclylene having 0-10 heteroatoms.
   171. The composition or method of any one of the preceding embodiments, wherein each R is independently hydrogen, or an optionally substituted group selected from C₁-C₆ aliphatic, and C₃-C₁₄ monocyclic, bicyclic or polycyclic aryl, carbocyclic, heterocyclic, or heteroaryl ring having 0-10 heteroatoms.
   172. The composition or method of any one of embodiments 112-164, wherein L^{LD} is T^{LD}
   173. The composition or method of any one of embodiments 112-164, wherein L^{LD} is —NH—(CH₂)₆-T^{LD}-.
   174. The composition or method of any one of embodiments 112-164, wherein L^{LD} is —C(O)—NH—(CH₂)₆-T^{LD}-.
   175. The composition or method of embodiment 174, wherein —C(O)— is connected to -R^{LD}
   176. The composition or method of any one of embodiments 112-175, wherein T^{LD} is connected to 5′-O— or 3′-O— of Ac.
   177. The composition or method of any one of embodiments 112-176, wherein T^{LD} is connected to 5′-O— of Ac.
   178. The composition or method of any one of embodiments 112-176, wherein T^{LD} is connected to 3′-O— of Ac.
   179. The composition or method of any one of embodiments 112-178, wherein T^{LD} forms a phosphorothioate linkage with 5′-O— or 3′-O— of Ac.
   180. The composition or method of embodiment 179, wherein a phosphorothioate linkage is chirally controlled and is Sp.
   181. The composition or method of embodiment 179, wherein a phosphorothioate linkage is chirally controlled and is Rp.
   182. The composition or method of any one of embodiments 112-178, wherein T^{LD} forms a phosphate linkage with 5′-O— or 3′-O— of Ac.
   183. The composition or method of any one of embodiments 112-162, wherein L^{LD} is a covalent bond.
   184. The composition or method of any one of the preceding embodiments, R^{LD} is an optionally substituted, C₁₀-C₈₀ saturated or partially unsaturated aliphatic group, wherein one or more methylene units are optionally and independently replaced by an optionally substituted group selected from C₁-C₆ alkylene, C₁-C₆ alkenylene, —C≡C—, a C₁-C₆ heteroaliphatic moiety, —C(R′)₂—, —Cy-, —O—, —S—, —S—S—, —N(R′)—, —C(O)—, —C(S)—, —C(NR′)—, —C(O)N(R′)—, —N(R′)C(O)N(R′)—, —N(R′)C(O)—, —N(R′)C(O)O—, —OC(O)N(R′)—, —S(O)—, —S(O)₂—, —S(O)₂N(R′)—, —N(R′)S(O)₂—, —SC(O)—, —C(O)S—, —OC(O)—, and —C(O)O—.
   185. The composition or method of any one of the preceding embodiments, wherein R^{LD} is an optionally substituted, C₁₀-C₈₀ saturated or partially unsaturated aliphatic group, wherein one or more methylene units are optionally and independently replaced by —C(O)—.
   186. The composition or method of any one of the preceding embodiments, wherein R^{LD} is an optionally substituted, C₁₀-C₆₀ saturated or partially unsaturated aliphatic group, wherein one or more methylene units are optionally and independently replaced by —C(O)—.
   187. The composition or method of any one of the preceding embodiments, wherein R^{LD} is an optionally substituted, C₁₀-C40 saturated or partially unsaturated aliphatic group, wherein one or more methylene units are optionally and independently replaced by —C(O)—.
   188. The composition or method of any one of the preceding embodiments, wherein R^{LD}comprises 10, 11, 12, 13, 14, 15, 16, 17, 18, 19, 20, 21, 22, 23, 24, 25, 26, 27, 28, 29, 30 or more carbon atoms.
   189. The composition or method of any one of the preceding embodiments, wherein at least one R^{LD} comprises or is a targeting component.
   190. The composition or method of any one of the preceding embodiments, wherein at least one R^{LD} is a targeting component.
   191. The composition or method of any one of the preceding embodiments, wherein at least one R^{LD} comprises a lipid moiety.
   192. The composition or method of any one of the preceding embodiments, wherein at least one R^{LD} is a lipid moiety.
   193. The composition or method of any one of the preceding embodiments, wherein R^{LD} is an optionally substituted, C₁₀-C₈₀ saturated or partially unsaturated aliphatic group.
   194. The composition or method of any one of the preceding embodiments, wherein R^{LD} is an optionally substituted, C₁₀-C₆₀ saturated or partially unsaturated aliphatic group.
   195. The composition or method of any one of the preceding embodiments, wherein R^{LD} is an optionally substituted, C₁₀-C40 saturated or partially unsaturated aliphatic group.
   196. The composition or method of any one of the preceding embodiments, wherein R^{LD} is unsubstituted linear or branched C₁₀-C₈₀ aliphatic group.
   197. The composition or method of any one of the preceding embodiments, wherein R^{LD} is unsubstituted linear or branched C₁₀-C₆₀ aliphatic group.
   198. The composition or method of any one of the preceding embodiments, wherein R^{LD} is unsubstituted linear or branched C₁₀-C40 aliphatic group.
   199. The composition or method of any one of embodiments 112-198, wherein R^{LD} is palmityl.
   200. The composition or method of any one of the preceding embodiments 112-198, wherein R^{LD} is

[chemical structure]

201. The composition or method of any one of embodiments 112-198, wherein R^{LD} is lauryl.
202. The composition or method of any one of embodiments 112-198, wherein R^{LD} is myristyl.
203. The composition or method of any one of embodiments 112-198, wherein R^{LD} is stearyl.
204. The composition or method of any one of embodiments 112-198, wherein R^{LD} is

[chemical structure]

205. The composition or method of any one of embodiments 112-198, wherein R^{LD} is

[chemical structure]

206. The composition or method of any one of embodiments 112-198, wherein R^{LD} is

[chemical structure]

207. The composition or method of any one of embodiments 112-198, wherein R^{LD} is

[chemical structure]

208. The composition or method of any one of embodiments 112-198, wherein R^{LD} is

[chemical structure]

209. The composition or method of any one of embodiments 112-198, wherein R^{LD} is

[chemical structure]

210. The composition or method of any one of embodiments 112-192, wherein R^{LD} is

[chemical structure]

211. The composition or method of any one of embodiments 112-192, wherein R^{LD} is

[chemical structure]

212. The composition or method of any one of embodiments 112-192, wherein R^{LD} is

[chemical structure]

213. The composition or method of any one of embodiments 112-192, wherein R^{LD} is

[chemical structure]

214. The composition or method of any one of embodiments 112-192, wherein R^{LD} is

[chemical structure]

215. The composition or method of any one of embodiments 112-192, wherein R^{LD} is

[chemical structure]

216. The composition or method of any one of embodiments 112-192, wherein R^{LD} is

[chemical structure]

217. The composition or method of any one of embodiments 112-192, wherein R^{LD} is

[chemical structure]

218. The composition or method of any one of embodiments 112-192, wherein R^{LD} is

[chemical structure]

219. The composition or method of any one of embodiments 112-192, wherein R^{LD} is

[chemical structure]

220. The composition or method of any one of embodiments 112-192, wherein R^{LD} is

[chemical structure]

221. The composition or method of any one of embodiments 112-192, wherein R^{LD} is

[chemical structure]

222. The composition or method of any one of embodiments 112-192, wherein R^{LD} is

[chemical structure]

223. The composition or method of any one of embodiments 112-192, wherein R^{LD} is

[chemical structure]

224. The composition or method of any one of embodiments 112-192, wherein R^{LD} is

[chemical structure]

225. The composition or method of any one of embodiments 112-192, wherein R^{LD} is

[chemical structure]

226. The composition or method of any one of embodiments 112-192, wherein R^{LD} is

[chemical structure]

227. The composition or method of any one of embodiments 112-192, wherein R^{LD} is

[chemical structure]

228. The composition or method of any one of embodiments 112-192, wherein R^{LD} is

[chemical structure]

229. The composition or method of any one of embodiments 112-192, wherein R^{LD} is

[chemical structure]

230. The composition or method of any one of embodiments 112-192, wherein R^{LD} is

[chemical structure]

231. The composition or method of any one of embodiments 112-192, wherein R^{LD} is

[chemical structure]

232. The composition or method of any one of embodiments 112-192, wherein R^{LD} is

[chemical structure]

233. The composition or method of any one of embodiments 112-192, wherein R^{LD} is

[chemical structure]

234. The composition or method of any one of embodiments 112-192, wherein R^{LD} is

[chemical structure]

235. The composition or method of any one of embodiments 112-192, wherein -[-L^{LD}-(R^{LD})ₐ]_{b} is

[chemical structure]

236. The composition or method of any one of embodiments 112-192, wherein -[-L^{LD}-(R^{LD})ₐ]_{b} is

[chemical structure]

237. The composition or method of any one of embodiments 112-192, wherein -[-L^{LD}-(R^{LD})ₐ]_{b} is

[chemical structure]

238. The composition or method of any one of embodiments 112-192, wherein -[-L^{LD}-(R^{LD})ₐ]_{b} is

[chemical structure]

239. The composition or method of any one of embodiments 112-192, wherein

[chemical structure]

240. The composition or method of any one of embodiments 112-192, wherein -[-L^{LD}-(R^{LD})ₐ]_{b} is

[chemical structure]

241. The composition or method of any one of embodiments 112-192, wherein -[-L^{LD}-(R^{LD})ₐ]_{b} is

[chemical structure]

242. The composition or method of any one of embodiments 112-192, wherein -[-L^{LD}-(R^{LD})ₐ]_{b} is

[chemical structure]

243. The composition or method of any one of embodiments 112-192, wherein -[-L^{LD}-(R^{LD})ₐ]_{b} is

[chemical structure]

244. The composition or method of any one of embodiments 112-192, wherein -[-L^{LD}-(R^{LD})ₐ]_{b} is

[chemical structure]

245. The composition or method of any one of embodiments 112-192, wherein -[-L^{LD}-(R^{LD})ₐ]_{b} is

[chemical structure]

246. The composition or method of any one of embodiments 112-192, wherein -[-L^{LD}-(R^{LD})ₐ]_{b} is

[chemical structure]

247. The composition or method of any one of embodiments 112-192, wherein -[-L^{LD}-(R^{LD})ₐ]_{b} is

[chemical structure]

248. The composition or method of any one of embodiments 112-192, wherein -[-L^{LD}-(R^{LD})ₐ]_{b} is

[chemical structure]

249. The composition or method of any one of embodiments 112-192, wherein -[-L^{LD}-(R^{LD})ₐ]_{b} is

[chemical structure]

250. The composition of any one of embodiments 112-190, wherein R^{LD} is

[chemical structure]

251. The composition of any one of embodiments 112-190, wherein R^{LD} is

[chemical structure]

252. The composition of any one of embodiments 112-190, wherein R^{LD} is

[chemical structure]

253. The composition of any one of embodiments 112-190, wherein R^{LD} is

[chemical structure]

254. The composition of any one of embodiments 112-190, wherein R^{LD} is

[chemical structure]

255. The composition of any one of embodiments 112-190, wherein R^{LD} is

[chemical structure]

256. The composition of any one of embodiments 112-184 and 189-190, wherein R^{LD} is

[chemical structure]

257. The composition of any one of embodiments 112-190, wherein R^{LD} is

[chemical structure]

258. The composition of any one of embodiments 112-190, wherein R^{LD} is

[chemical structure]

259. The composition of any one of embodiments 112-184 and 189-190, wherein R^{LD} is

[chemical structure]

260. The composition of any one of embodiments 112-190, wherein R^{LD} is

[chemical structure]

261. The composition of any one of embodiments 112-190, wherein R^{LD} is

[chemical structure]

262. The composition of any one of embodiments 112-190, wherein R^{LD} is

[chemical structure]

263. The composition of any one of embodiments 112-190, wherein R^{LD} is

[chemical structure]

264. The composition of any one of embodiments 112-190, wherein R^{LD} is

[chemical structure]

265. The composition of any one of embodiments 112-190, wherein -[-L^{LD}-(R^{LD})ₐ]_{b} is

[chemical structure]

266. The composition of any one of embodiments 112-190, wherein -[-L^{LD}-(R^{LD})ₐ]_{b} is

[chemical structure]

267. The composition of any one of embodiments 112-190, wherein -[-L^{LD}-(R^{LD})ₐ]_{b} is

[chemical structure]

268. The composition of any one of embodiments 112-190, wherein -[-L^{LD}-(R^{LD})ₐ]_{b} is

[chemical structure]

269. The composition of any one of embodiments 220-249 and 261-268, wherein X is O.
270. The composition of any one of embodiments 220-249 and 261-268, wherein X is S.
271. The composition of embodiment 269, wherein —O—P(O)(X⁻)— connects to 5′-O— of A^{c} to form a phosphate linkage.
272. The composition of embodiment 269, wherein —O—P(O)(X⁻)— connects to 3′-O— of A^{c} to form a phosphate linkage.
273. The composition of embodiment 270, wherein —O—P(O)(X⁻)— connects to 5′-O— of A^{c} to form a phosphorothioate linkage.
274. The composition of embodiment 270, wherein —O—P(O)(X⁻)— connects to 3′-O— of A^{c} to form a phosphorothioate linkage.
275. The composition of embodiment 273 or 274, wherein the phosphorothioate linkage is chirally controlled.
276. The composition of embodiment 273 or 274, wherein the phosphorothioate linkage is chirally controlled and is Sp.
277. The composition of embodiment 273 or 274, wherein the phosphorothioate linkage is chirally controlled and is Rp.
278. The composition or method of any one of the preceding embodiments, wherein at least 0.5%, 1%, 2%, 3%, 4%, 5%, 6%, 7%, 8%, 9%, 10%, 20%, 30%, 40%, 50%, 60%, 70%, 75%, 80%, 81%, 82%, 83%, 84%, 85%, 86%, 87%, 88%, 89%, 90%, 91%, 92%, 93%, 94%, 95%, 96%, 97%, 97% or 99% of the oligonucleotides that have the base sequence of the particular oligonucleotide type, defined by 1) base sequence; 2) pattern of backbone linkages; 3) pattern of backbone chiral centers; and 4) pattern of backbone phosphorus modifications, are oligonucleotides of the particular oligonucleotide type.
279. The composition or method of any one of the preceding embodiments, wherein at least 10% of the oligonucleotides that have the base sequence of the particular oligonucleotide type, defined by 1) base sequence; 2) pattern of backbone linkages; 3) pattern of backbone chiral centers; and 4) pattern of backbone phosphorus modifications, are oligonucleotides of the particular oligonucleotide type.
280. The composition or method of any one of the preceding embodiments, wherein at least 0.5%, 1%, 2%, 3%, 4%, 5%, 6%, 7%, 8%, 9%, 10%, 20%, 30%, 40%, 50%, 60%, 70%, 75%, 80%, 81%, 82%, 83%, 84%, 85%, 86%, 87%, 88%, 89%, 90%, 91%, 92%, 93%, 94%, 95%, 96%, 97%, 97% or 99% of the oligonucleotides that have the base sequence, pattern of backbone linkages, and pattern of backbone phosphorus modifications of the particular oligonucleotide type, defined by 1) base sequence; 2) pattern of backbone linkages; 3) pattern of backbone chiral centers; and 4) pattern of backbone phosphorus modifications, are oligonucleotides of the particular oligonucleotide type.
281. The composition or method of any one of the preceding embodiments, wherein at least 10% of the oligonucleotides that have the base sequence, pattern of backbone linkages, and pattern of backbone phosphorus modifications of the particular oligonucleotide type, defined by 1) base sequence; 2) pattern of backbone linkages; 3) pattern of backbone chiral centers; and 4) pattern of backbone phosphorus modifications, are oligonucleotides of the particular oligonucleotide type.
282. The composition of any one of embodiments 1-277, wherein the oligonucleotides have a predetermined level of a percentage of 1%-100% of all oligonucleotides in the composition.
283. The composition of any one of embodiments 1-277, wherein the oligonucleotides have a predetermined level of a percentage ofl %-100% of all oligonucleotides in the composition that share the common base sequence.
284. The composition of any one of embodiments 1-277, wherein the oligonucleotides have a predetermined level of a percentage of 1%-100% of all oligonucleotides in the composition that share the common base sequence, the common pattern of base modification, the common pattern of sugar modification, and the common pattern of modified internucleotidic linkages.
285. The composition of any one of embodiments 282-284, wherein the percentage is at least 1%.
286. The composition of any one of embodiments 282-284, wherein the percentage is at least 5%.
287. The composition of any one of embodiments 282-284, wherein the percentage is at least 10%.
288. The composition of any one of embodiments 282-284, wherein the percentage is (90%)ⁿ-100%, wherein n is the number of chirally controlled internucleotidic linkages.
289. The composition of any one of embodiments 282-288, wherein the percentage is at least (91%)ⁿ, (92%)ⁿ, (93%)ⁿ, (94%)ⁿ, (95%)ⁿ, (96%)ⁿ, (97%)ⁿ, (98%)ⁿ, or (99%)ⁿ.
290. The composition of any one of embodiments 282-288, wherein the percentage is at least (92%)ⁿ.
291. The composition of any one of embodiments 282-288, wherein the percentage is at least (95%)ⁿ.
292. The composition of any one of embodiments 282-288, wherein the percentage is at least (97%)ⁿ.
293. The composition of any one of embodiments 282-288, wherein the percentage is at least (98%)ⁿ.
294. The composition of any one of embodiments 289-293, wherein product of diastereopurity of each of the chirally controlled internucleotidic linkages is utilized as the level, wherein diastereopurity of each chirally controlled internucleotidic linkage is represented by diastereopurity of a dimer comprising the same internucleotidic linkage and 5′- and 3′-nucleosides flanking the internucleotidic linkage and prepared under comparable methods as the oligonucleotides, which comparable methods comprise the same oligonucleotide preparation cycles that include identical reagents and reaction conditions for the dimer as for the chirally controlled internucleotidic linkage in the oligonucleotides.
295. The composition of any one of embodiments 282-294, all oligonucleotides in the composition that share a common base sequence, a common pattern of base modification, a common pattern of sugar modification, and/or a common pattern of modified internucleotidic linkages are at least 1%, 5%, 10%, 15%, 20%, 25%, 30%, 35%, 40%, 45%, 50%, 55%, 60%, 65%, 70%, 75%, 80%, 85%, 90%, 91%, 92%, 93%, 94%, 95%, 96%, 97%, 98%, or 99% of all oligonucleotides in the composition.
296. The composition of any one of embodiments 282-295, all oligonucleotides in the composition that share a common base sequence, a common pattern of base modification, a common pattern of sugar modification, and/or a common pattern of modified internucleotidic linkages are at least 90% of all oligonucleotides in the composition.
297. The composition of any one of embodiments 282-295, all oligonucleotides in the composition that share a common base sequence, a common pattern of base modification, a common pattern of sugar modification, and/or a common pattern of modified internucleotidic linkages are at least 1%, 5%, 10%, 15%, 20%, 25%, 30%, 35%, 40%, 45%, 50%, 55%, 60%, 65%, 70%, 75%, 80%, 85%, 90%, 91%, 92%, 93%, 94%, 95%, 96%, 97%, 98%, or 99% of all oligonucleotides in the composition.
298. The composition of any one of embodiments 282-297, all oligonucleotides in the composition that share a common base sequence, a common pattern of base modification, a common pattern of sugar modification, and/or a common pattern of modified internucleotidic linkages are at least 90% of all oligonucleotides in the composition.
299. The composition or method of any one of the preceding embodiments, wherein the composition is a pharmaceutical composition comprising one or more pharmaceutically acceptable salts of the oligonucleotides.
300. The composition or method of any one of the preceding embodiments, wherein the composition is a pharmaceutical composition comprising one or more pharmaceutically acceptable sodium salts of the oligonucleotides.
301. The composition or method of any one of the proceeding embodiments, wherein the composition further comprises one or more other therapeutic agents.
302. A method for modulating hTLR9 agonist activity, comprising administering an oligonucleotide composition comprising oligonucleotide comprising a lipid moiety.
303. A method for modulating hTLR9 agonist activity, comprising administering an oligonucleotide comprising a lipid moiety, wherein hTLR9 agonist activity is reduced compared to an oligonucleotide absent the lipid moiety but is otherwise identical to the oligonucleotide.
304. A method for modulating hTLR9 antagonist activity, comprising administering an oligonucleotide composition comprising oligonucleotide comprising a lipid moiety.
305. A method for modulating hTLR9 antagonist activity, comprising administering an oligonucleotide comprising a lipid moiety, wherein hTLR9 antagonist activity is increased compared to an oligonucleotide absent the lipid moiety but is otherwise identical to the oligonucleotide.
306. A method for modulating hTLR9 activity of an oligonucleotide, comprising incorporating a lipid moiety to the oligonucleotide.
307. A method for decreasing hTLR9 agonist activity of an oligonucleotide, comprising incorporating a lipid moiety to the oligonucleotide.
308. A method for increasing hTLR9 antagonist activity of an oligonucleotide, comprising incorporating a lipid moiety to the oligonucleotide.
309. The method of any one of the preceding embodiments, wherein the oligonucleotide comprising a lipid moiety is an oligonucleotide comprising a lipid moiety of any one of the preceding embodiments.
310. A method of agonizing an immune response in a human cell, the method comprising the step of contacting the human cell with a CpG oligonucleotide composition of any one of the preceding embodiments, wherein the CpG oligonucleotide is capable of agonizing a TLR9-mediated or TLR9-associated immune response.
311. A method of antagonizing an immune response in a human cell, the method comprising the step of contacting the human cell with a CpG oligonucleotide composition of any one of the preceding embodiments, wherein the CpG oligonucleotide is capable of antagonizing a TLR9-mediated or TLR9-associated immune response.
312. A method of modulating an immune response in a subject, the method comprising the step of administering a composition of any one of preceding embodiments, wherein the CpG oligonucleotide is capable of modulating a TLR9-mediated or TLR9-associated immune response.
313. A method of agonizing an immune response in a human being in need thereof, the method comprising the step of contacting the human with an immunologically effective amount of CpG oligonucleotide composition of any one of the preceding embodiments.
314. The method of any one of the preceding embodiments, wherein the human has a disease.
315. The method of any one of the preceding embodiments, wherein the human has a disease amenable to treatment with an agonized immune response.
316. The method of any one of the preceding embodiments, wherein the human has a disease selected from an infectious disease, a genetic disease, and cancer.
317. A method of increasing an immune response to an immunologically active component in a subject, comprising administering an immunologically effective amount of (a) a composition of any one of the preceding embodiments and (b) the immunologically active component.
318. The composition of any one of the preceding embodiments, wherein the immunologically active component is selected from: an immunogen, an antigen, a toxin, a virus, a bacterium, a fungus, an infectious agent, a cancer antigen, a pathogen, and a component thereof.
319. A method of identifying a second oligonucleotide composition with decreased immune stimulation in a subject compared to a first oligonucleotide composition, the method comprising steps of:
[2005] (a) measuring the immune stimulation mediated by the first oligonucleotide composition, wherein the first oligonucleotide composition comprising oligonucleotides that have a common base sequence comprising at least one CpG region;
[2006] (b) measuring the immune stimulation mediated by a second oligonucleotide composition, wherein the second oligonucleotide composition has the same common base sequence as the first oligonucleotide composition, and wherein the CpG region of oligonucleotides of the second composition differs in its pattern of chiral centers from the corresponding region of oligonucleotides of the first oligonucleotide composition;
[2007] (c) optionally repeating step (b), each repeat with a different second oligonucleotide composition, and selecting a second oligonucleotide composition which mediates less immune stimulation than the first oligonucleotide composition.
   320. The method of any one of the preceding embodiments, wherein the first oligonucleotide is immunostimulatory in a human cell.
   321. The method of any one of the preceding embodiments, wherein the second oligonucleotide comprises at least one phosphorothioate in the Sp conformation and at least one phosphorothioate in the Rp conformation in the CpG region motif.
   322. The method of any one of the preceding embodiments, wherein the second oligonucleotide does not comprise an agonistic CpG region motif described herein.
   323. The method of any one of the preceding embodiments, wherein the second oligonucleotide does not comprise an antagonistic CpG region motif described herein.
   324. The method of any one of the preceding embodiments, wherein the second oligonucleotide does not comprise an agonistic or antagonistic CpG region motif described herein.
   325. A method of improving a characteristic of a CpG oligonucleotide composition comprising at least two CpG oligonucleotides, wherein the method comprises a step of:
[2008] (a) decreasing the amount in the composition of at least one of the at least two CpG oligonucleotides, wherein each of the at least two CpG oligonucleotides is defined by the stereochemistry of a CpG region motif, and wherein the at least one of the at least two CpG oligonucleotides is determined to have an inferior characteristic relative to the CpG oligonucleotide composition.
   326. A method of improving a characteristic of a stereorandom CpG oligonucleotide composition, wherein the method comprises a step of:
[2009] (a) decreasing the amount in the composition of at least one of the at least two CpG oligonucleotides, wherein each of the at least two CpG oligonucleotides is defined by the stereochemistry of a CpG region motif, and wherein the at least one of the at least two CpG oligonucleotides is determined to have an inferior characteristic relative to the CpG oligonucleotide composition, wherein the characteristic is increased activity, improved efficacy, reduced toxicity, increased stability, increased delivery, or increased biological half-life.
   327. A method of designing a second oligonucleotide mediating decreased immune stimulation in a human cell relative to the immune stimulation mediated by a first oligonucleotide, the method comprising the steps of:
[2010] (a) measuring the immune stimulation mediated by a first oligonucleotide, wherein the first oligonucleotide has a defined base sequence comprising at least one CpG region;
[2011] (b) measuring the immune stimulation mediated by one or more second oligonucleotides, wherein the second oligonucleotides have the same base sequence as the first oligonucleotide and further comprise one or more phosphorothioates in the CpG region motif, wherein the stereochemistry of the phosphorothioates in the CpG region motif of the second oligonucleotides differs from the stereochemistry of any phosphorothioates in the CpG region motif of the first oligonucleotides, wherein steps (a) and (b) can be performed in any order;
[2012] (c) selecting a second oligonucleotide which mediates less immune stimulation than the first oligonucleotide.
   328. The method of any one of the preceding embodiments, wherein the first oligonucleotide is immunostimulatory in a human cell.
   329. The method of any one of the preceding embodiments, wherein the second oligonucleotide comprises at least one phosphorothioate in the Sp conformation and at least one phosphorothioate in the Rp conformation in the CpG region motif.
   330. The method of any one of the preceding embodiments, wherein the second oligonucleotide does not comprise an agonistic CpG region motif described herein.
   331. The method of any one of the preceding embodiments, wherein the second oligonucleotide does not comprise an antagonistic CpG region motif described herein.
   332. The method of any one of the preceding embodiments, wherein the second oligonucleotide does not comprise an agonistic or antagonistic CpG region motif described herein.
   333. A method of decreasing the immune stimulation in a human cell mediated by a first oligonucleotide, the method comprising the steps of:
[2013] (a) providing the first oligonucleotide, wherein the first oligonucleotide has a defined base sequence comprising at least one CpG region; and measuring the immune stimulation in a human cell mediated by the first oligonucleotide;
[2014] (b) providing one or more second oligonucleotides, wherein the second oligonucleotides have the same base sequence as the first oligonucleotide and further comprise one or more phosphorothioates in the CpG region, wherein the stereochemistry of the phosphorothioates in the CpG region of the second oligonucleotides differs from the stereochemistry of any phosphorothioates in the CpG region of the first oligonucleotides; and measuring the immune stimulation in a human cell of the second oligonucleotides, wherein steps (a) and (b) can be performed in any order;
[2015] (c) selecting a second oligonucleotide which mediates less immune stimulation than the first oligonucleotide; and
[2016] (d) contacting the cell with the second oligonucleotide.
   334. The method of any one of the preceding embodiments, wherein the first oligonucleotide is immunostimulatory in a human cell.
   335. The method of any one of the preceding embodiments, wherein the second oligonucleotide comprises at least one phosphorothioate in the Sp conformation and at least one phosphorothioate in the Rp conformation in the CpG region motif.
   336. The method of any one of the preceding embodiments, wherein the second oligonucleotide does not comprise an agonistic CpG region motif described herein.
   337. The method of any one of the preceding embodiments, wherein the second oligonucleotide does not comprise an antagonistic CpG region motif described herein.
   338. The method of any one of the preceding embodiments, wherein the second oligonucleotide does not comprise an agonistic or antagonistic CpG region motif described herein.
   339. A composition comprising an oligonucleotide, wherein the oligonucleotide mediates less immune stimulation than a reference oligonucleotide, wherein the second oligonucleotide is selected using a method comprising the steps of:
[2017] (a) providing the reference oligonucleotide, wherein the reference oligonucleotide has a defined base sequence comprising at least one CpG region; and measuring the immune stimulation in a human cell mediated by the reference oligonucleotide;
[2018] (b) providing one or more second oligonucleotides, wherein the second oligonucleotides have the same base sequence as the reference oligonucleotide and further comprise one or more phosphorothioates in the CpG region, wherein the stereochemistry of the phosphorothioates in the CpG region of the second oligonucleotides differs from the stereochemistry of any phosphorothioates in the CpG region of the reference oligonucleotides; and measuring the immune stimulation in a human cell of the second oligonucleotides, wherein steps (a) and (b) can be performed in any order;
[2019] (c) selecting a second oligonucleotide which mediates less immune stimulation than the reference oligonucleotide.
   340. The method of any one of the preceding embodiments, wherein the reference oligonucleotide is immunostimulatory in a human cell.
   341. The method of any one of the preceding embodiments, wherein the second oligonucleotide comprises at least one phosphorothioate in the Sp conformation and at least one phosphorothioate in the Rp conformation in the CpG region motif.
   342. The method of any one of the preceding embodiments, wherein the second oligonucleotide does not comprise an agonistic CpG region motif described herein.
   343. The method of any one of the preceding embodiments, wherein the second oligonucleotide does not comprise an antagonistic CpG region motif described herein.
   344. The method of any one of the preceding embodiments, wherein the second oligonucleotide does not comprise an agonistic or antagonistic CpG region motif described herein.
   345. A method of administering a therapeutic oligonucleotide to a patient, wherein the therapeutic oligonucleotide mediates less immune stimulation than a first oligonucleotide, wherein the therapeutic oligonucleotide is selected using a method comprising the steps of:
[2020] (e) providing the first oligonucleotide, wherein the first oligonucleotide has a defined base sequence comprising at least one CpG region; and measuring the immune stimulation in a human cell mediated by the first oligonucleotide;
[2021] (f) providing one or more second oligonucleotides, wherein the second oligonucleotides have the same base sequence as the first oligonucleotide and further comprise one or more phosphorothioates in the CpG region, wherein the stereochemistry of the phosphorothioates in the CpG region of the second oligonucleotides differs from the stereochemistry of any phosphorothioates in the CpG region of the first oligonucleotides; and measuring the immune stimulation in a human cell of the second oligonucleotides, wherein steps (a) and (b) can be performed in any order;
[2022] (g) selecting a second oligonucleotide which mediates less immune stimulation than the first oligonucleotide as the therapeutic oligonucleotide.
   346. The method of any one of the preceding embodiments, wherein the first oligonucleotide is immunostimulatory in a human cell.
   347. The method of any one of the preceding embodiments, wherein the second oligonucleotide comprises at least one phosphorothioate in the Sp conformation and at least one phosphorothioate in the Rp conformation in the CpG region motif.
   348. The method of any one of the preceding embodiments, wherein the second oligonucleotide does not comprise an agonistic CpG region motif described herein.
   349. The method of any one of the preceding embodiments, wherein the second oligonucleotide does not comprise an antagonistic CpG region motif described herein.
   350. The method of any one of the preceding embodiments, wherein the second oligonucleotide does not comprise an agonistic or antagonistic CpG region motif described herein.
   351. A method, comprising administering a composition comprising a first plurality of oligonucleotides, each of which:
[2023] (a) hybridizes with a particular target sequence; and
[2024] (b) has base sequence that includes at least one CpG region motif present in all oligonucleotides of the plurality (a “common CpG region motif”), which CpG region motif has a structure:

[chemical structure]

[2025] wherein each (*R/S) is independently a chiral internucleotidic linkage, wherein the composition is chirally controlled in that it contains a predetermined level of each of stereoisomers 1-8 (S1-S8) for each common CpG region motif:

[chemical structure]

[2026] wherein the composition is characterized by reduced immune stimulation relative to a reference composition, which differs from the composition in that it is stereorandom with respect to internucleotidic linkages of at least one CpG region motif.
   352. In a method of administering an oligonucleotide composition comprising a plurality of oligonucleotides having a common base sequence, the improvement that comprises: administering a composition comprising a first plurality of oligonucleotides, each of which:
[2027] (a) hybridizes with a particular target sequence; and
[2028] (b) has base sequence that includes at least one CpG region motif present in all oligonucleotides of the plurality (a “common CpG region motif”), which CpG region motif has a structure:

[chemical structure]

[2029] wherein each (*R/S) is independently a chiral internucleotidic linkage, wherein the composition is chirally controlled in that it contains a predetermined level of each of stereoisomers 1-8 (S1-S8) for each common CpG region motif:

[chemical structure]

[2030] wherein the composition is characterized by reduced immune stimulation relative to a reference composition, which differs from the composition in that it is stereorandom with respect to internucleotidic linkages of at least one CpG region motif.
   353. A method, comprising administering a chirally controlled oligonucleotide composition that is chirally controlled in that the composition comprises a predetermined level of oligonucleotides of an individual oligonucleotide type, wherein an oligonucleotide type is defined by:
[2031] 1) base sequence;
[2032] 2) pattern of backbone linkages;
[2033] 3) pattern of backbone chiral centers; and
[2034] 4) pattern of backbone phosphorus modifications;
   wherein each oligonucleotide of the individual oligonucleotide type independently comprises at least one copy of a CpG region motif:

[chemical structure]

wherein:
each (*R/S) is independently a chiral internucleotidic linkage;
oligonucleotides of the individual oligonucleotide have the common base sequence; and the chirally controlled oligonucleotide composition displays reduced immune stimulation relative to a reference oligonucleotide composition, which reference oligonucleotide composition is a stereorandom oligonucleotide composition comprising oligonucleotides having the same common base sequence, or a chirally controlled oligonucleotide composition of oligonucleotides having the same common base sequence but of a different oligonucleotide type.
354. In a method of administering an oligonucleotide composition comprising a plurality of oligonucleotides having a common base sequence, the improvement that comprises: administering a chirally controlled oligonucleotide composition that is chirally controlled in that the composition comprises a predetermined level of oligonucleotides of an individual oligonucleotide type, wherein an oligonucleotide type is defined by:
[2035] 1) base sequence;
[2036] 2) pattern of backbone linkages;
[2037] 3) pattern of backbone chiral centers; and
[2038] 4) pattern of backbone phosphorus modifications;
   wherein each oligonucleotide of the individual oligonucleotide type independently comprises at least one copy of a CpG region motif:

[chemical structure]

wherein:
each (*R/S) is independently a chiral internucleotidic linkage;
oligonucleotides of the individual oligonucleotide type have the common base sequence; and the chirally controlled oligonucleotide composition displays reduced immune stimulation relative to a reference oligonucleotide composition, which reference oligonucleotide composition is a stereorandom oligonucleotide composition comprising oligonucleotides having the same common base sequence, or a chirally controlled oligonucleotide composition of oligonucleotides having the same common base sequence but of a different oligonucleotide type.
355. The method of any one of the preceding embodiments, wherein the reference oligonucleotide composition is a chirally controlled oligonucleotide composition of oligonucleotides having the same common base sequence but a different pattern of backbone chiral centers.
356. The method of any one of the preceding embodiments, wherein the reference oligonucleotide composition is a chirally controlled oligonucleotide composition of oligonucleotides having the same common base sequence but a different pattern of backbone chiral centers.
357. A method, comprising administering a chirally controlled oligonucleotide composition, wherein the composition comprises a plurality of oligonucleotides, each of which:
[2039] (a) hybridizes with a particular target sequence;
[2040] (b) has base sequence that includes at least one C residue in a CpG that is present in all oligonucleotides of the plurality (a “common C residue”) and that has a 5-methyl group, a 2′-OMe group in its sugar moiety, or both; and
[2041] (c) includes one or more chiral internucleotidic linkages, so that each oligonucleotide is a particular stereoform, characterized by its stereoidentity [stereoidentity=which stereoisomer is present at a particular chiral linkage] at each of the one or more chiral internucleotidic linkages, wherein
[2042] the composition is chirally controlled in that it contains a predetermined level of each stereoform, and the composition is substantially free of those stereoforms that individually, and in the absence of other stereoforms, activate TLR9.
   358. In a method comprising administering a chirally controlled oligonucleotide composition, wherein the composition comprises a plurality of oligonucleotides, each of which:
[2043] (a) hybridizes with a particular target sequence;
[2044] (b) has base sequence that includes at least one C residue in a CpG region motif that is present in all oligonucleotides of the plurality (a “common C residue”) and that has a 5-methyl group, a 2′-OMe group in its sugar moiety, or both; and
[2045] (c) includes one or more chiral internucleotidic linkages;
[2046] the improvement that comprises administering a composition comprising a plurality of oligonucleotides, each of which:
[2047] (a) hybridizes with the same target sequence;
[2048] (b) has base sequence that includes the same common C residue in a CpG region motif that has a 5-methyl group, a 2′-OMe group in its sugar moiety, or both; and
[2049] (c) includes one or more chiral internucleotidic linkages, so that each oligonucleotide is a particular stereoform, characterized by its stereoidentity [stereoidentity=which stereoisomer is present at a particular chiral linkage] at each of the one or more chiral internucleotidic linkages, wherein
[2050] the composition is chirally controlled in that it contains a predetermined level of each stereoform, and the composition is substantially free of those stereoforms that individually, and in the absence of other stereoforms, activate TLR9.
   359. A method, comprising administering a composition that is chirally controlled in that the composition comprises a predetermined level of oligonucleotides of an individual oligonucleotide type, wherein an oligonucleotide type is defined by:
[2051] 1) base sequence;
[2052] 2) pattern of backbone linkages;
[2053] 3) pattern of backbone chiral centers; and
[2054] 4) pattern of backbone phosphorus modifications;
   wherein the base sequence includes at least one C residue in a CpG region motif that has a 5-methyl group, a 2′-OMe group in its sugar moiety, or both; and
   the composition is substantially free of oligonucleotides of a different oligonucleotide type having the same sequence that individually, and in the absence of other stereoforms, activate TLR9.
   360. In a method comprising administering a composition of oligonucleotides of a common base sequence, wherein the common base sequence includes at least one C residue in a CpG region motif that has a 5-methyl group, a 2′-OMe group in its sugar moiety, or both; the improvement comprises administering a composition that is chirally controlled in that the composition comprises a predetermined level of oligonucleotides of an individual oligonucleotide type, wherein an oligonucleotide type is defined by:
[2055] 1) base sequence;
[2056] 2) pattern of backbone linkages;
[2057] 3) pattern of backbone chiral centers; and
[2058] 4) pattern of backbone phosphorus modifications;
   wherein oligonucleotides of the individual oligonucleotide type has the same common sequence, the base sequence includes the same at least one C residue in a CpG region motif that has a 5-methyl group, a 2′-OMe group in its sugar moiety, or both; and
   the composition is substantially free of oligonucleotides of a different oligonucleotide type having the same sequence that individually, and in the absence of other stereoforms, activate TLR9.
   361. A method comprising a step of administering to a subject a composition of any one of preceding embodiments.
   362. In a method of agonizing an immune response in a subject, the improvement comprises: administering to the subject a composition of any one of the preceding embodiments.
   363. In a method of agonizing an immune response in a human subject, the improvement comprises: administering to the subject a composition of any one of the preceding embodiments.
   364. The composition or method of any of the preceding embodiments, wherein the oligonucleotides are structurally identical.
   365. The composition or method of any of the preceding embodiments, wherein each (*R/S) is independently a phosphorothioate linkage.
   366. The composition or method of any of the preceding embodiments, wherein the oligonucleotides comprises an Rp phosphorothioate linkage within a CpG region motif, and an Sp phosphorothioate linkage within a CpG region motif.
   367. The composition or method of any of the preceding embodiments, wherein the at least one CpG region motif comprises at least comprises an Rp phosphorothioate linkage and at least one Sp phosphorothioate linkage within a CpG region motif.
   368. The composition or method of any of the preceding embodiments, wherein the oligonucleotides comprise at least X nucleotides.
   369. The composition or method of any of the preceding embodiments, wherein the oligonucleotides comprise no more than X nucleotides.
   370. The composition or method of any of the preceding embodiments, wherein the oligonucleotides comprise 5 or more chiral internucleotidic linkages;
   371. The composition or method of any of the preceding embodiments, wherein the oligonucleotides comprise 10 or more chiral internucleotidic linkages;
   372. The composition or method of any of the preceding embodiments, wherein the oligonucleotides comprise 15 or more chiral internucleotidic linkages.
   373. The composition or method of any one of the preceding embodiments, wherein one or more nucleotides in the CpG region is an RNA or DNA nucleotide.
   374. The composition or method of any one of the preceding embodiments, wherein at least one sugar is not modified.
   375. The composition or method of any one of the preceding embodiments, wherein at least one sugar is modified.
   376. The composition or method of any one of the preceding embodiments, wherein at least one sugar is modified, wherein the modification is 2′-OMe, 2′-MOE, 2′-F, or 2′-OR, wherein R is optionally substituted C₁₋₆ alkyl.
   377. The composition or method of any of the preceding embodiments, wherein the modification is 2′-OR, wherein R is optionally substituted C₁₋₆ alkyl.
   378. The composition or method of any one of the preceding embodiments, wherein at least five sugars are modified.
   379. The composition or method of any one of the preceding embodiments, wherein at least five sugars are modified, wherein the modification is 2′-OMe, 2′-MOE, 2′-F, or 2′-OR, wherein R is optionally substituted C₁₋₆ alkyl.
   380. The composition or method of any one of the preceding embodiments, wherein at least ten sugars are modified.
   381. The composition or method of any one of the preceding embodiments, wherein at least ten sugars are modified, wherein the modification is 2′-OMe, 2′-MOE, 2′-F, or 2′-OR, wherein R is optionally substituted C₁₋₆ alkyl.
   382. The composition or method of any one of the preceding embodiments, wherein the strand further comprises a nucleotide substitute.
   383. The composition or method of any one of the preceding embodiments, wherein the strand further comprises a Morpholino, PNA, LNA, BNA, TNA, GNA, ANA, FANA, CeNa, HNA or UNA.
   384. The composition or method of any one of the preceding embodiments, wherein at least one internucleotidic linkage is modified.
   385. The composition or method of any one of the preceding embodiments, wherein at least one internucleotidic linkage is selected from: phosphorodithioate, phosphoramidate, boranophosphonoate, an amide linker, or a compound of formula (I): (I), where R3 is selected from O″, S″, NH2, BH3, CH3, C1-6 alkyl, C6-10 aryl, C₁₋₆ alkoxy and C6-10 aryl-oxy, wherein C1-6 alkyl and C6-10 aryl are unsubstituted or optionally independently substituted with 1 to 3 groups independently selected from halo, hydroxyl and NH2; and R4 is selected from O, S, NH, or CH2.
   386. The composition or method of any one of the preceding embodiments, wherein at least one internucleotidic linkage is phosphorodithioate.
   387. The composition or method of any one of the preceding embodiments, wherein the CpG oligonucleotide further comprises a second strand.
   388. The composition or method of any one of the preceding embodiments, wherein the CpG oligonucleotide is capable of agonizing an immune response.
   389. The composition or method of any one of the preceding embodiments, wherein the CpG oligonucleotide is capable of agonizing an immune response in human cells.
   390. The composition or method of any one of the preceding embodiments, wherein the immune response is agonized in a human cell or human.
   391. The composition or method of any one of the preceding embodiments, wherein the CpG oligonucleotide further comprises a second strand.
   392. The composition or method of any one of the preceding embodiments, wherein each oligonucleotide in the plurality/composition has the same base sequence
   393. The composition or method of any one of the preceding embodiments, wherein, for at least one common CpG region motif, the composition is substantially free of at least stereoisomer S8, so that the predetermined level is considered to be substantially zero.
   394. The composition or method of any one of the preceding embodiments, wherein, for at least one common CpG region motif, the composition is substantially free of at least seven of the stereoisomers, so that the predetermined level is considered to be substantially zero for seven of the stereoisomers.
   395. The composition or method of any one of the preceding embodiments, wherein each oligonucleotide in the composition includes at least one non-chiral internucleosidic linkage outside of the CpG region motif.
   396. The composition or method of any one of the preceding embodiments, wherein the composition is substantially racemic for at least one chiral internucleosidic linkage outside of the CpG region motif.
   397. The composition or method of any one of the preceding embodiments, wherein the CpG region motif's “C” residue is methylated and the composition is substantially free of at least stereoisomers.
   398. Wherein the composition is capable of activating an TLR9-associated or TLR9-mediated immune response less than a stereorandom composition of oligonucleotides having the same sequence.
   399. The composition or method of any one of the preceding embodiments, wherein the C residue in the CpG region motif comprises a 2′-OMe group in its sugar moiety . . . .
   400. The composition or method of any one of the preceding embodiments, wherein the C residue in the CpG region motif is a 5-methyl-2′-OMe C residue
   401. The composition or method of any one of the preceding embodiments, wherein one or more nucleotides in the CpG region is RNA or DNA.
   402. The composition or method of any one of the preceding embodiments, wherein at least one sugar is not modified.
   403. The composition or method of any one of the preceding embodiments, wherein at least one sugar is modified.
   404. The composition or method of any one of the preceding embodiments, wherein at least one sugar is modified, wherein the modification is 2′-OMe, 2′-MOE, 2′-F, or 2′-OR, wherein R is optionally substituted C₁₋₆ alkyl.
   405. The composition or method of any one of the preceding embodiments, wherein at least five sugars are modified.
   406. The composition or method of any one of the preceding embodiments, wherein at least five sugars are modified, wherein the modification is 2′-OMe, 2′-MOE, 2′-F, or 2′-OR, wherein R is optionally substituted C₁₋₆ alkyl.
   407. The composition or method of any one of the preceding embodiments, wherein at least ten sugars are modified.
   408. The composition or method of any one of the preceding embodiments, wherein at least ten sugars are modified, wherein the modification is 2′-OMe, 2′-MOE, 2′-F, or 2′-OR, wherein R is optionally substituted C₁₋₆ alkyl.
   409. The composition or method of any one of the preceding embodiments, wherein the strand comprises a nucleotide substitute.
   410. The composition or method of any one of the preceding embodiments, wherein the strand further comprises a Morpholino, PNA, LNA, BNA, TNA, GNA, ANA, FANA, CeNa, HNA or UNA.
   411. The composition or method of any one of the preceding embodiments, wherein at least one internucleotidic linkage is modified.
   412. The composition or method of any one of the preceding embodiments, wherein at least one internucleotidic linkage is selected from: phosphorodithioate, phosphoramidate, boranophosphonoate, an amide linker, or a compound of formula (I): (I), where R3 is selected from O″, S″, NH2, BH3, CH3, C1-6 alkyl, C6-10 aryl, C₁₋₆ alkoxy and C6-10 aryl-oxy, wherein C1-6 alkyl and C6-10 aryl are unsubstituted or optionally independently substituted with 1 to 3 groups independently selected from halo, hydroxyl and NH2; and R4 is selected from O, S, NH, or CH2.
   413. The composition or method of any one of the preceding embodiments, further comprising a immunologically active component.
   414. The composition or method of any one of the preceding embodiments, further comprising a immunologically active component selected from: an immunogen, an antigen, a toxin, a virus, a bacterium, a fungus, an infectious agent, a cancer antigen, a pathogen, and a component thereof.
   415. The composition or method of any one of the preceding embodiments, further comprising a immunologically active component, wherein the CpG oligonucleotide is conjugated to the immunologically active component.
   416. The composition or method of any one of the preceding embodiments, further comprising a immunologically active component selected from: an immunogen, an antigen, a toxin, a virus, a bacterium, a fungus, an infectious agent, a cancer antigen, a pathogen, and a component thereof, wherein the CpG oligonucleotide is conjugated to the immunologically active component.
   417. The composition or method of any one of the preceding embodiments, further comprising an additional adjuvant, a stabilizer, a preservative, or an antibiotic.
   418. The composition or method of any one of the preceding embodiments, wherein *R is a modified internucleotidic linkage in the Rp conformation, *S is a modified internucleotidic linkage in the Sp conformation, and *R/S is a modified internucleotidic linkage in the Rp or Sp conformation.
   419. The composition or method of any one of the preceding embodiments, wherein *R is a phosphorothioate in the Rp conformation, *S is a phosphorothioate in the Sp conformation, and *R/S is phosphorothioate in the Rp or Sp conformation.
   420. A chirally controlled oligonucleotide composition comprising a CpG oligonucleotide comprising a strand comprising about 14 to about 49 nucleotides, wherein the strand comprises at least two copies of CpG region motif N₁-(*R/S)-C-(*R/S)-G-(*R/S)-N₂, wherein at least one (*R/S) is a modified internucleotidic linkage in the Rp conformation and at least one (*R/S) is a modified internucleotidic linkage in the Sp conformation, and each of N1 and N2 is independently any nucleoside.
   421. A chirally controlled oligonucleotide composition comprising a CpG oligonucleotide comprising a strand comprising about 14 to about 49 nucleotides, wherein the strand comprises at least two copies of CpG region motif N₁-(*R/S)-C-(*R/S)-G-(*R/S)-N₂, wherein at least one (*R/S) is a phosphorothioate in the Rp conformation and at least one (*R/S) is a phosphorothioate in the Sp conformation, and each of N1 and N2 is independently any nucleoside.
   422. A composition comprising a CpG oligonucleotide comprising a strand comprising about 14 to about 49 nucleotides, wherein the strand comprises at least two copies of CpG region motif N₁-(*R/S)-C-(*R/S)-G-(*R/S)-N₂, wherein at least one (*R/S) is a phosphorothioate in the Rp conformation and at least one (*R/S) is a phosphorothioate in the Sp conformation, and each of N1 and N2 is independently any nucleoside.
   423. The method or composition of any of the preceding embodiments, wherein the CpG oligonucleotide comprises two or more copies of a CpG region motif.
   424. The method or composition of any of the preceding embodiments, wherein the CpG oligonucleotide comprises two or more copies of a CpG region motif disclosed herein.
   425. The method or composition of any of the preceding embodiments, wherein the CpG oligonucleotide comprises two or more CpG region motifs disclosed herein.
   426. The method or composition of any of the preceding embodiments, wherein the CpG oligonucleotide comprises two or more CpG region motifs disclosed herein, wherein the motifs are different from each other.
   427. The method or composition of any of the preceding embodiments, wherein the CpG oligonucleotide comprises two or more CpG region motifs disclosed herein, wherein the motifs are the same as each other.
   428. The method or composition of any of the preceding embodiments, wherein the CpG oligonucleotide is agonistic.
   429. The method or composition of any of the preceding embodiments, wherein the CpG oligonucleotide is agonistic in human cells.
   430. The method or composition of any of the preceding embodiments, wherein the CpG oligonucleotide is agonistic, as measured by an increase in secretion of a cytokine, interferon-alpha, interferon-gamma, IL-4, IL-6, IL-8, IL-10, IL-12, and/or TNF-alpha, and/or an increase in NF-κβ activity.
   431. The method or composition of any of the preceding embodiments, wherein the CpG oligonucleotide is antagonistic.
   432. The method or composition of any of the preceding embodiments, wherein the CpG oligonucleotide is antagonistic in human cells.
   433. The method or composition of any of the preceding embodiments, wherein the CpG oligonucleotide is antagonistic, as measured by a decrease in secretion of a cytokine, interferon-alpha, interferon-gamma, IL-4, IL-6, IL-8, IL-10, IL-12, and/or TNF-alpha, and/or an increase in NF-κβ activity.
   434. An assay for assessing TLR9 agonist activity, comprising an oligonucleotide composition of any one of the preceding embodiments.
   435. An assay for assessing TLR9 antagonist activity, comprising an oligonucleotide composition of any one of the preceding embodiments.
   436. A method for assessing TLR9 agonist activity, comprising providing an oligonucleotide composition of any one of the preceding embodiments.
   437. A method for assessing TLR9 antagonist activity, comprising providing an oligonucleotide composition of any one of the preceding embodiments.
   438. A method for inducing a cytokine, comprising providing an oligonucleotide composition of any one of the preceding embodiments.
   439. A method for reducing production of a cytokine, comprising providing an oligonucleotide composition of any one of the preceding embodiments.
   440. A method for modulating production and/or activities of a cytokine, interferon-alpha, interferon-gamma, IL-4, IL-6, IL-8, IL-10, IL-12, TNF-alpha and NF-Kp, comprising providing a composition of any one of the preceding embodiments.
   441. A method of any one of the preceding embodiments, comprising incorporating a lipid moiety into an oligonucleotide.
   442. A method, comprising administering to a subject an oligonucleotide composition of any one of the preceding embodiments and a second therapeutic agent.
   443. A pharmaceutical composition, comprising an oligonucleotide composition of any one of the preceding embodiments and a second therapeutic agent.
   444. The method or composition of any one of the preceding embodiments, wherein a second therapeutic agent is an antibody.
   445. The method or composition of embodiment 442 or 443, wherein a second therapeutic agent is or comprises an antigen.
   446. The method or composition of embodiment 442 or 443, wherein a second therapeutic agent is a vaccine.
   447. A compound having the structure of formula O—I:

[chemical structure]

[2059] or a salt thereof, wherein:
   [2060] each BA is independently an optionally substituted group selected from C₁₋₃₀ cycloaliphatic, C₆₋₃₀ aryl, C₅₋₃₀ heteroaryl having 1-10 heteroatoms, C₃₋₃₀ heterocyclyl having 1-10 heteroatoms, a natural nucleobase moiety, and a modified nucleobase moiety;
   [2061] each of R^{5E} and R^{s} is independently —H, —F, —Cl, —Br, —I, —CN, —N₃, —NO, —NO₂, -L-R′, -L-OR′, -L-SR′, -L-N(R′)₂, —O-L-OR′, —O-L-SR′, or —O-L-N(R′)₂;
   [2062] s is 0-20;
   [2063] each L is independently a covalent bond, or a bivalent, optionally substituted, linear or branched group selected from a C₁₋₃₀ aliphatic group and a C₁₋₃₀ heteroaliphatic group having 1-10 heteroatoms, wherein one or more methylene units are optionally and independently replaced with C₁₋₆ alkylene, C₁₋₆ alkenylene, —C≡C—, —C(R′)₂—, —O—, —S—, —S—S—, —N(R′)—, —C(O)—, —C(S)—, —C(NR′)—, —C(O)N(R′)—, —N(R′)C(O)N(R′)—, —N(R′)C(O)O—, —S(O)—, —S(O)₂—, —S(O)₂N(R′)—, —C(O)S—, —C(O)O—, —P(O)(OR′)—, —P(O)(SR′)—, —P(O)(R′)—, —P(O)(NR′)—, —P(S)(OR′)—, —P(S)(SR′)—, —P(S)(R′)—, —P(S)(NR′)—, —P(R′)—, —P(OR′)—, —P(SR′)—, —P(NR′)—, —P(OR′)[B(R′)₃]—, —OP(O)(OR′)O—, —OP(O)(SR′)O—, —OP(O)(R′)O—, —OP(O)(NR′)O—, —OP(OR′)O—, —OP(SR′)O—, —OP(NR′)O—, —OP(R′)O—, or —OP(OR′)[B(R′)₃]O—; and one or more carbon atoms are optionally and independently replaced with Cy^{L};
   [2064] each Cy^{L} is independently an optionally substituted tetravalent group selected from a C₃₋₂₀ cycloaliphatic ring, a C₆₋₂₀ aryl ring, a 5-20 membered heteroaryl ring having 1-10 heteroatoms, and a 3-20 membered heterocyclyl ring having 1-10 heteroatoms;
   [2065] each Ring A is independently an optionally substituted 3-20 membered monocyclic, bicyclic or polycyclic ring having 0-10 heteroatoms;
   [2066] each L^{P} is independently an internucleotidic linkage;
   [2067] z is 1-1000;
   [2068] L³E is -L- or -L-L-;
   [2069] R^{3E} is —R′, -L-R′, —OR′, or a solid support;
   [2070] each R′ is independently —R, —C(O)R, —C(O)OR, or —S(O)₂R;
   [2071] each R is independently —H, or an optionally substituted group selected from C₁₋₃₀ aliphatic, C₁₋₃₀ heteroaliphatic having 1-10 heteroatoms, C₆₋₃₀ aryl, C₆₋₃₀ arylaliphatic, C₆₋₃₀ arylheteroaliphatic having 1-10 heteroatoms, 5-30 membered heteroaryl having 1-10 heteroatoms, and 3-30 membered heterocyclyl having 1-10 heteroatoms, or
   [2072] two R groups are optionally and independently taken together to form a covalent bond, or:
   [2073] two or more R groups on the same atom are optionally and independently taken together with the atom to form an optionally substituted, 3-30 membered monocyclic, bicyclic or polycyclic ring having, in addition to the atom, 0-10 heteroatoms; or
   [2074] two or more R groups on two or more atoms are optionally and independently taken together with their intervening atoms to form an optionally substituted, 3-30 membered monocyclic, bicyclic or polycyclic ring having, in addition to the intervening atoms, 0-10 heteroatoms.
      448. A compound having the structure of formula O—I:

[chemical structure]

[2075] or a salt thereof, wherein:
   [2076] each BA is independently an optionally substituted group selected from C₁₋₃₀ cycloaliphatic, C₆₋₃₀ aryl, C₅₋₃₀ heteroaryl having 1-10 heteroatoms, C₃₋₃₀ heterocyclyl having 1-10 heteroatoms, a natural nucleobase moiety, and a modified nucleobase moiety;
   [2077] each of R^{5E} and R^{s} is independently —H, —F, —Cl, —Br, —I, —CN, —N₃, —NO, —NO₂, -L-R′, -L-OR′, -L-SR′, -L-N(R′)₂, —O-L-OR′, —O-L-SR′, or —O-L-N(R′)₂;
   [2078] s is 0-20;
   [2079] each L is independently a covalent bond, or a bivalent, optionally substituted, linear or branched group selected from a C₁₋₃₀ aliphatic group and a C₁₋₃₀ heteroaliphatic group having 1-10 heteroatoms, wherein one or more methylene units are optionally and independently replaced with C₁₋₆ alkylene, C₁₋₆ alkenylene, —C≡C—, —C(R′)₂—, —O—, —S—, —S—S—, —N(R′)—, —C(O)—, —C(S)—, —C(NR′)—, —C(O)N(R′)—, —N(R′)C(O)N(R′)—, —N(R′)C(O)O—, —S(O)—, —S(O)₂—, —S(O)₂N(R′)—, —C(O)S—, —C(O)O—, —P(O)(OR′)—, —P(O)(SR′)—, —P(O)(R′)—, —P(O)(NR′)—, —P(S)(OR′)—, —P(S)(SR′)—, —P(S)(R′)—, —P(S)(NR′)—, —P(R′)—, —P(OR′)—, —P(SR′)—, —P(NR′)—, —P(OR′)[B(R′)₃]—, —OP(O)(OR′)O—, —OP(O)(SR′)O—, —OP(O)(R′)O—, —OP(O)(NR′)O—, —OP(OR′)O—, —OP(SR′)O—, —OP(NR′)O—, —OP(R′)O—, or —OP(OR′)[B(R′)₃]O—; and one or more carbon atoms are optionally and independently replaced with Cy^{L};
   [2080] each Cy^{L} is independently an optionally substituted tetravalent group selected from a C₃₋₂₀ cycloaliphatic ring, a C₆₋₂₀ aryl ring, a 5-20 membered heteroaryl ring having 1-10 heteroatoms, and a 3-20 membered heterocyclyl ring having 1-10 heteroatoms;
   [2081] each Ring A is independently an optionally substituted 3-20 membered monocyclic, bicyclic or polycyclic ring having 0-10 heteroatoms;
   [2082] each L^{P} independently has the structure of formula L-I:

[chemical structure]

[2083] or a salt form thereof, wherein:
   [2084] P^{L} is P(═W), P, or P→B(R′)₃;
   [2085] W is O, S or Se;
   [2086] R¹ is -L-R, halogen, —CN, —NO₂, —Si(R)₃, —OR, —SR, or —N(R)₂;
   [2087] each of X, Y and Z is independently —O—, —S—, —N(-L-R¹)—, or L;
   [2088] z is 1-1000;
   [2089] L³E is -L- or -L-L-;
   [2090] R^{3E} is —R′, -L-R′, —OR′, or a solid support;
   [2091] each R′ is independently —R, —C(O)R, —C(O)OR, or —S(O)₂R;
   [2092] each R is independently —H, or an optionally substituted group selected from C₁₋₃₀ aliphatic, C₁₋₃₀ heteroaliphatic having 1-10 heteroatoms, C₆₋₃₀ aryl, C₆₋₃₀ arylaliphatic, C₆₋₃₀ arylheteroaliphatic having 1-10 heteroatoms, 5-30 membered heteroaryl having 1-10 heteroatoms, and 3-30 membered heterocyclyl having 1-10 heteroatoms, or
   [2093] two R groups are optionally and independently taken together to form a covalent bond, or:
   [2094] two or more R groups on the same atom are optionally and independently taken together with the atom to form an optionally substituted, 3-30 membered monocyclic, bicyclic or polycyclic ring having, in addition to the atom, 0-10 heteroatoms; or
   [2095] two or more R groups on two or more atoms are optionally and independently taken together with their intervening atoms to form an optionally substituted, 3-30 membered monocyclic, bicyclic or polycyclic ring having, in addition to the intervening atoms, 0-10 heteroatoms.
      449. The compound of any one of embodiments 447-448, wherein z is at least 10.
      450. The compound of any one of embodiments 447-448, wherein z is at least 15.
      451. The compound of any one of embodiments 447-450, wherein each Ring A is independently

[chemical structure]

wherein:
[2096] BA is connected at Cl;
[2097] each of R^{1s}, R^{2s}, R^{3s}, R^{4s} and R^{5s} is independently R^{s}.
   452. The compound of embodiment 451, wherein each Ring A is independently

[chemical structure]

453. The compound of embodiment 451, wherein each Ring A is independently

[chemical structure]

wherein R^{2s} is not —OH.
454. The compound of any one of embodiments 451-453, wherein R^{2s} is —H, halogen, or —OR.
455. The compound of any one of embodiments 451-453, wherein R^{2s} is —H, halogen, or —OR, wherein R is optionally substituted C₁₋₆ alkyl.
456. The compound of embodiment 451, wherein each Ring A is independently

[chemical structure]

wherein R^{2s} and R^{4s} are R, and the two R groups are taken together with their intervening atoms to form a ring.
457. The compound of embodiment 456, wherein Ring A is optionally substituted

[chemical structure]

458. The compound of embodiment 456, wherein Ring A is

[chemical structure]

459. The compound of embodiment 456, wherein Ring A is

[chemical structure]

460. The compound of any one of embodiments 447-456, wherein each BA is independently an optionally substituted group selected from C₁₋₃₀ cycloaliphatic, C₆₋₃₀ aryl, C₅₋₃₀ heteroaryl having 1-10 heteroatoms, and C₃₋₃₀ heterocyclyl having 1-10 heteroatoms.
461. The compound of any one of embodiments 447-456, wherein each BA is independently an optionally substituted group selected from C₆₋₃₀ aryl, C₅₋₃₀ heteroaryl having 1-10 heteroatoms, and C₃₋₃₀ heterocyclyl having 1-10 heteroatoms.
462. The compound of any one of embodiments 447-456, wherein each BA is independently an optionally substituted group selected from heteroaryl having 1-10 heteroatoms, and C3-30 heterocyclyl having 1-10 heteroatoms.
463. The compound of any one of embodiments 447-456, wherein each BA is independently an optionally substituted C₅₋₃₀ heteroaryl group having 1-10 heteroatoms.
464. The compound of any one of embodiments 447-463, wherein each BA is independently optionally substituted or protected adenine, cytosine, guanosine, thymine, or uracil.
465. The compound of any one of embodiments 447-463, wherein each BA is independently optionally substituted adenine, cytosine, guanosine, thymine, or uracil.
466. The compound of any one of embodiments 447-465, wherein R^{3E} is —H.
467. The compound of any one of embodiments 447-465, wherein R^{3E} is —OH.
468. The compound of any one of embodiments 447-465, wherein R^{3E} is a solid support for oligonucleotide synthesis.
469. The compound of any one of embodiments 447-468, wherein L^{3E} is -L-.
470. The compound of any one of embodiments 447-468, wherein L^{3E} is a covalent bond.
471. The compound of any one of embodiments 447-468, wherein L^{3E} is —O—.
472. The compound of any one of embodiments 447-471, wherein z is no more than 200.
473. The compound of any one of embodiments 447-472, wherein z is no more than 100.
474. The compound of any one of embodiments 447-473, wherein z is no more than 50.
475. The compound of any one of embodiments 447-474, wherein R^{E} is —CH₂OR.
476. The compound of any one of embodiments 447-474, wherein R^{E} is —CH₂OH.
477. The compound of any one of embodiments 447-474, wherein a heteroatom is independently selected from oxygen, nitrogen, sulfur, phosphorus, boron and silicon.
478. The compound of any one of embodiments 447-474, wherein a heteroatom is independently selected from oxygen, nitrogen, sulfur, and phosphorus.
479. The compound of any one of embodiments 447-474, wherein a heteroatom is independently selected from oxygen, nitrogen, and sulfur.
480. The compound of any one of embodiments 447-479, wherein the compound is a salt.
481. The compound of any one of embodiments 447-480, wherein the compound is an all-sodium salt.
482. The composition or method of any one of the preceding embodiments, wherein the oligonucleotides are each a compound of any one of embodiments 447-481.
483. The composition or method of any one of the preceding embodiments, wherein Ac—[H]a or Ac—[H]b is a compound of any one of embodiments 447-481.

### EXEMPLIFICATION

[2098] The foregoing has been a description of certain non-limiting embodiments of the disclosure. Accordingly, it is to be understood that the embodiments of the disclosure herein described are merely illustrative of the application of the principles of the disclosure. Reference herein to details of the illustrated embodiments is not intended to limit the scope of the claims.

[2099] Non-limiting examples are provided below. A person of ordinary skill in the art would appreciate that multiple methods for testing for agonism or antagonism of an immune response in mouse, human and other cells are known in the art.

### Example 1. Example Assessment of TLR9 Agonist and Antagonist Activities

[2100] In this example, we have utilized efficient chemical approaches that allowed us to synthesize a series of chirally controlled oligonucleotide compositions. We systemically evaluated how PS chirality influences the immune activities of TLR9. We demonstrate that PS chirality plays critical role in modulating TLR9 activity of synthetic oligos in a species-specific manner. In both mouse model and human PBMCs, we demonstrate that stereopure oligonucleotide and stereorandom mixtures could have very different TLR9 activities. More importantly, we provide evidence that mouse and human TLR9 respond differently to stereopure oligos with 2′-modifications and CpG methylations. These findings demonstrated the advantage of chirally controlled oligonucleotide compositions, for example, avoiding the daunting task of characterizing potential hazardous stereoisomers present in a stereorandom oligonucleotide mixture. A person having ordinary skill in the art appreciates that using technologies described in this disclosure, other chirally controlled oligonucleotide compositions can be prepared with desired agonist, antagonist, or neutral (neither agonist or antagonist) activities for various systems and species.

[2101] We evaluated four stereopure oligos that shared a common CpG-containing sequence targeting SMAD7 (FIG. 1a). A reporter cell line specific for mTLR9 was employed to investigate the agonist activities of these oligos. Reporter cells were incubated with serial dilutions of oligos for 16 hrs in the absence of transfection reagent (see methods). Reporter activities were indicated as fold of signal increase. The all-Sp oligonucleotide, WV-1384, was found to be an mTLR9 agonist, while the all-Rp oligonucleotide, WV-1386, was not (FIG. 3). Agonist activity of WV-1384 was mouse-specific, since it did not show any agonist activity toward hTLR9 (FIG. 9).

[2102] Antagonist activities of these two stereopure oligos on mTLR9 were examined using the same reporter cell line, but in the presence of ODN1826, a known mTLR9 agonist. The all-Rp oligonucleotide, WV-1386, was a strong antagonist inhibiting the TLR9 activating properties of ODN1826, while the all-Sp oligonucleotide, WV-1384, was not (FIG. 1). The opposite effects of all-Sp and all-Rp oligos on mTLR9 were supported with oligos with different sequences. For example, WV-1512, an all-Sp CpG-oligonucleotide targeting SOD1, similarly showed strong agonist activity on mTLR9 (FIG. 10), and not on hTLR9 (FIG. 13).

[2103] We next asked whether the PS chirality in or surrounding the CpG motif was important to mTLR9 activities. In WV-1384, there were two CpG motifs (underlined), both of which had Sp configurations. When these were converted to Rp, we generated WV-1375, which had Rp chirality in the two CpG motifs, and Sp chiralities in all other PS bonds (FIG. 2). WV-1375 showed enhanced agonist activities compared to WV-1384, indicating that Rp chirality in the CpG motif was beneficial to mTLR9 agonist activities. We then went further and converted the chirality of the four PS bonds adjacent to the two CpG motifs from Sp to Rp. Unexpectedly, this oligonucleotide, WV-1373, completely lost the mTLR9 agonist activity and was a strong mTLR9 antagonist. Without the intention to be bound by theory, these results may indicate that in this case Rp chirality adjacent to CpG motifs (e.g., in the CpG region) may not be tolerated for mTLR9 agonists.

[2104] It is well-known that methylation of CpG often abolishes or significantly reduces the TLR9 agonist activities of an oligonucleotide with normal phosphate (PO) bonds. We asked whether this applies to CpG-oligonucleotide with PS linkages. Two pairs of stereopure oligos were generated (FIGS. 2 to 4). In the first pair WV-966 and WV-1384 had common all-Sp backbones; but they had different methylation statuses on CpG, with WV-966 being the methylated version of WV-1384 (FIG. 3). The second pair of CpG-oligos, WV-1374 and WV-1375, similarly had either methylated (WV-1374) or unmethylated CpG (WV-1375), but with a Rp in the CpG motif (FIG. 3). Agonist activities of these four oligos were tested on mouse TLR9 reporter cells. In the context of an all-Sp backbone, methylation moderately reduced the agonist activity of CpG oligonucleotide by only 2-fold. However, in the context of Rp-substituted CpG motifs, methylation had a very strong effect, with a reduction of activity by about 10-fold (FIG. 3). This PS chirality-dependent effect of methylation on CpG was confirmed with oligos targeting different sequences (FIG. 11).

[2105] We next examined the differences in TLR9 activation between stereorandom and stereopure isomers. WV-499, the stereorandom counterpart of the stereopure oligonucleotide WV-966, is completely devoid of mTLR9 agonist activity in vitro (FIG. 4), and was an antagonist on mTLR9. In an in vivo TNBS induced IBD mouse model, oral administration of WV-499 at 250 mg/kg significantly reduced the inflammation in the gut as measured by colitis score of inflammation, edema and mucosal necrosis of colon sections; while its stereopure isomer, WV-966, had little effect. This result demonstrated that a stereorandomer could have activity very different from its stereopure counterparts on mouse TLR9 protein.

[2106] To explore the effects of PS chiralities on TLR9 of human origin, we systemically modified the PS linkages in ODN2006, a well-known hTLR9 agonistic oligonucleotide widely used in the field. Modifications were introduced simultaneously to all of the four CpG motifs present in ODN2006. For each of the CpG motif, three relevant PS linkages, one in CpG motif and two adjacent to it, were the focus of PS chirality investigation. These three relevant PS bonds had a total of eight combinations of PS chiralities, which from 5′ to 3′ were RRR, SRR, RSR, RRS, SSR, SRS, RSS and SSS (FIG. 2a). PS in the rest of the oligos were maintained as Sp configurations. In total, eight stereopure oligos were generated, from WV-1694 to WV-1701 (FIG. 7).

[2107] Agonist activity of the eight stereopure oligos was tested in a human TLR9 specific reporter cell line. As shown in FIG. 7, chirality of the PS linkage either within the CpG motif, or on the 5′ side of CpG motif, could be either Sp or Rp configuration. A 2 to 5 fold reduction on agonist activity was observed in all four oligos that had an Rp configuration 3′ of CpG motif. For example, at concentrations of 0.31 nM or 0.16 nM, WV-1699 (SRR) showed a 2.5-fold weaker agonist activity compared to WV-1696 (SRS). Similarly, WV-1697 (SSR) with Rp on the 3′ of CpG motif was 3-fold less potent than WV-1694 (SSS); WV-1700 (RSR) 2-fold less potent than WV-1695 (RSS); WV-1701(RRR) than WV-1698 (RRS).

[2108] In addition to PS linkages, substitutions at the 2′ carbon position with F, OMe or MOE on nucleotide ribose rings may also contribute significantly to improved physical and biological profiles of synthetic oligonucleotides. It was reported that 2′-modifications on CpG motif significantly reduced or eliminated the TLR9 agonist activities of oligonucleotides tested. Haas et al. 2008 Immunity 28: 315-323; and Agrawal et al. 2001 Curr. Cancer Drug Target 1: 197-209.

[2109] We evaluated the effect of 2′-modifications on a mouse TLR9 agonist. WV-1375 is a stereopure DNA oligonucleotide and a strong mTLR9 agonist (FIGS. 3 and 6). WV-1375 has two CpG motifs composed of DNA monomers, i.e. with hydrogen at the 2′ position. We generated two 2′-modified versions of WV-1375, with Omethyl groups in WV-1381, and MOE groups in WV-1377 (FIG. 6). These substitutions led to complete loss of agonist activities on mouse TLR9, and converted both WV-1381 and WV-1377 into mTLR9 antagonists (FIG. 6). We also examined the effect of CpG methylation. WV-1376 was the CpG methylated counterpart of WV-1377; and WV-1380 the CpG methylated counterpart of WV-1381. CpG methylation had no additional effects on the mTLR9 antagonist activities, indicating that 2′-modifications already strongly suppressed the immune activation activities of the CpG-oligos on mTLR9.

[2110] We next examined whether 2′-modifications similarly affect human TLR9. WV-458, a stereorandomer, is an antisense oligonucleotide targeting SOD1 (FIG. 18). It was designed as a 5-10-5 type of antisense oligonucleotide (ASO) with a core of ten DNA nucleotides, and five 2′-MOE modified RNA nucleotides on each of the two termini (also called wings). The DNA core binds to target RNAs and induces RNA cleavage through an RNaseH-mediated mechanism. There are a total of three CpG motifs in WV-458, with two CpG on the 5′ wing and one CpG on the 3′ wing. Since all of the three CpG motifs had methyl-C and were 2′-modified by MOE, it was believed that the modified oligonucleotide would have little or no agonistic activities on TLR9. As shown in FIG. 3b, WV-458 did show no agonist activity on either human or mouse TLR9.

[2111] We then investigated a series of stereopure oligos that had the same 2′-modifications and CpG methylation status, but with defined stereochemistry (FIG. 18). In WV-486 and WV-487, we introduced all-Sp configuration to nucleotides on the wings. WV-487 differed from WV-486 by a single Rp at position 12, designed to enhance the RNaseH activities of the antisense oligonucleotide (FIG. 3b). In WV-488, the wings were designed to have an all-Rp configuration. Agonist activities on hTLR9 were then evaluated. Results showed that WV-486 and WV-487 had no agonist activity; however, WV-488 was a surprisingly strong hTLR9 agonist, with activities comparable to that of ODN2006. The agonist activity of WV-488 was specific to human TLR9, as it showed no activity on mouse TLR9 or on cells without TLR9 (FIGS. 18 and 19). These results demonstrated that in some embodiments Rp PS linkages on the CpG may significantly improve the hTLR9 agonist activity of oligonucleotides with 2′-MOE modifications and C methylations.

[2112] We next tested whether the activity observed on WV-488 was CpG motif-dependent. Alteration of either CpG motif on the 5′ wing to ApG significantly reduced the agonists activity of WV-488 (FIG. 18), suggesting the indispensability of these CpG motifs to these oligonucleotides for TLR9 agonist.

[2113] We further investigated how each of the three CpG motifs contributed to the overall hTLR9 agonist activities of WV-488. We first generated three stereopure oligos where the chirality of the PS linkage in each of the three CpG motifs was converted one-by-one from Rp to Sp chirality, as shown in WV-1489, WV-1490 and WV-1491 (FIG. 15). For example, in WV-1489, the first CpG from the 5′ end of the oligonucleotide was converted from Rp to Sp; in WV-1490, the Rp linkage in the second CpG motif was converted to Sp; and WV-1491, third CpG was converted. Results showed that Rp-to-Sp conversion at each CpG motif had different effects on the overall hTLR9 agonist activities. For example, WV-1489 showed an approximately 2-fold decrease in hTLR9 agonist activity, compared to WV-488, suggesting that an Rp PS linkage in configuration of the first CpG motif on the 5′ of the oligonucleotide is beneficial to hTLR9 agonist activity. WV-1490 had about 5-fold increase in TLR9 activation after Rp-to-Sp conversion, indicating a preference for Sp chirality at the second CpG motif. WV-1491 showed no difference in activity from WV-488, indicating that chirality of the CpG on the 3′ of WV-488 does not influence hTLR9 activation as much. We next tested if the chiralities of the PS bonds adjacent to the CpG motif were critical to hTLR9 agonist activity. In WV-1492, all the adjacent PS linkages were converted from Rp to Sp, while those of the CpG motif themselves remained as Rp. This conversion showed complete loss of any hTLR9 agonist activity. These results demonstrated that PS chirality in both the CpG motifs themselves and the adjacent PS bonds contributes to the overall TLR9 agonist activities in position- and context-dependent manners.

[2114] We confirmed activities of provided stereopure oligos using human peripheral blood mononuclear cells (PBMCs), and profiled cytokines secreted using a multiplexed luminex assay that could detect and quantify a total of 38 different cytokines (FIG. 17). Consistent with the results generated in reporter cell lines, WV-485, WV-486 and WV-487 showed modest effect on cytokine induction from human PBMCs. Stereopure oligonucleotide WV-488 strongly induced the secretions of IL-6 and MIP-lb. These results generated from both TLR9 reporter cells and PBMCs suggest that stereorandom WV-458 was composed of stereoisomers that could be very potent hTLR9 agonists. In vitro, the agonist activity of WV-488 and other agonistic stereoisomers could be sequestered by other antagonistic stereoisomers (FIG. 20). Thus, the overall TLR9 activities of WV-458 appeared to be an hTLR9 antagonist (FIG. 15). In vivo, however, the immune response of a stereo-random oligos will depend on the half-life and distributions of various stereopure isomers.

[2115] FIGS. 1 to 4 show that PS chirality in CpG-oligos affects mouse TLR9 activity. These figures show mouse TLR9 responses against agonistic and inhibitory oligos. The activities were analyzed with an NFKp-dependent reporter assay. Data represent the mean fold of signal increase with standard deviations of three independent experiments. CpG motifs were underlined. PS chirality was indicated in color, with blue as Sp, red as Rp, black as random.

[2116] FIG. 7 shows that PS chirality in CpG-oligos affects human TLR9 activity. Shown are human TLR9 responses against agonistic oligonucleotides. The activities were analyzed with an NF-Kp-dependent reporter assay. Data represent the mean fold of signal increase with standard deviations of three independent experiments. CpG motifs were underlined. PS chirality was indicated in color, with blue as Sp, red as Rp, black as random. Methylated C was indicated with dotted circles.

[2117] FIGS. 6, 15, 17 and 18 show that 2′-modifications modulate TLR9 activity in species- and PS chirality-dependent manner. The data show that mouse or human TLR9 responses against agonistic and antagonistic oligonucleotides. The activities were analyzed with an NF-kb-dependent reporter assay. Data represent the mean fold of signal increase with standard deviations of three independent experiments. CpG motifs were underlined. PS chirality was indicated in color, with blue as Sp, red as Rp, black as random. Methylated C was indicated with dotted circles. 2′-Omethyl modification was indicated in gray-shaded circles. 2′-MOE modification was indicated in red-shaded circles. FIG. 17 shows Luminex assay to evaluate cytokines secreted from human PBMCs after treatments with indicated concentrations of oligos.

### Materials and Methods

[2118] Oligonucleotides: Sequence, chemical modifications, and stereochemistry for each oligos could be found in Table 4, including Table 4A (SMAD7 series), Table 4B (ODN2006 series) and Table 4C (SOD1 series).

[2119] Human or mouse TLR9 reporter assays.

[2120] HEK-Blue™ TLR9 cells stably overexpress the human or mTLR9 gene and an NF-kB inducible secreted embryonic alkaline phosphatase (SEAP) were obtained from Invivogen (San Diego, CA, USA). Oligonucleotides at indicated concentrations were plated into 96-well-plates in the final volume of 20 ul in water. 4×10\hat{ }4 HEK-Blue TLR9 cells were added to each well in a volume of 180 ul in SEAP detection medium. In certain conditions, oligos were added in the presence or absence of various concentrations of TLR9 agonists, and the cultures were continued for 16 h. At the end of the treatment, OD was measured at 655 nM. The results are expressed as fold change in NF-1B activation over phosphate buffered saline (PBS)-treated cells.

[2121] Human PBMC assays. Peripheral blood mononuclear cells (PBMCs) were freshly drawn from healthy human volunteer blood (Hemacare, MA, USA). Human PBMCs (5×10⁶/ml) were plated into 96-well plates in RPMI medium Supplemented with 10% heat-inactivated defined FBS, 1.5 mM glutamine, 1 mM sodium pyruvate, 0.1 mM non-essential amino acids, 50 μM 2-mercaptoethanol and 100 IU/ml penicillin-streptomycin mix. Oligos dissolved in water were added to the cells at concentrations indicated. The cells were then incubated at 37° C. for 24 h. The levels of cytokines and chemokines in the culture supernatants were measured by using ELISA (ELISA kits purchased from BD) or human 38-plex luminex kit according to the manufacturer's instructions and analyzed with a Luminex 100 or 200 instruments.

[2122] Example data were presented in the Figures.

### Example 2. Example In Vivo Delivery of Provided Oligonucleotides and Compositions

[2123] Example in vivo oligonucleotide treatment: Five-week-old mdx mice were dosed i.v. or subcutaneously at 5 mL/kg at concentration of 10 mg/mL on Day 1. On Day 4 (or other days as desired), all animals were subjected to both terminal blood and tissue collection. Plasma was aliquoted into polupropylene tubes and stored at −70° C. For tissue collections, all animals were euthanized via CO₂ asphyxiation, and perfused using PBS. The following tissues were also collected: liver, kidney, spleen, heart, thoracic diaphragm, gastrocnemius, quadriceps and triceps. Tissues were snap-frozen (in liquid nitrogen) and stored at −70° C.

[2124] Example procedure: In vivo biodistribution of the control oligonucleotide WV-942 and oligonucleotides to be tested (e.g., WV-2588, WV-2581, WV-2582, WV-2584, WV-2585, WV-2586, WV-2587, etc.) was tested following a single subcutaneous administration to C57BL/10ScSn-Dmd^{mdx}/J male mice 5 weeks of age (Jackson Laboratory, Stock #001801). Animals were housed at 18° C. to 26° C. and 30% to 70% humidity two per cage in polycarbonate cages during acclimation and throughout the study. Housing included Beta Chip® and Enviro-Dri contact bedding. Standard chow and water were supplied ad libitum. The study complied with all applicable sections of the Final Rules of the Animal Welfare Act regulations (Code of Federal Regulations, Title 9), the Public Health Service Policy on Humane Care and Use of Laboratory Animals from the Office of Laboratory Animal Welfare, and the Guide for the Care and Use of Laboratory Animals from the National Research Council. The protocol and any amendments or procedures involving the care or use of animals in this study were reviewed and approved by the Testing Facility Institutional Animal Care and Use Committee before the initiation of such procedures. Below was an example study design (Number of animals (males): 3):

| | | | Dosing | Test Article | Dose | |
|---|---|---|---|---|---|---|
| | | Dose, | Route/Dosing | Concentration, | Volume, | Termination |
| Group | Test Article | mg/kg | Day | mg/ml | ml/kg | Day |
| 1 | PBS | — | SC, Day 1 | 0 | 5 | Day 3 |
| 2 | WV-942 | 50 | SC, Day 1 | 10 | 5 | Day 3 |
| 3 | WV-2588 | 50 | SC, Day 1 | 10 | 5 | Day 3 |
| 4 | WV-2581 | 50 | SC, Day 1 | 10 | 5 | Day 3 |
| 5 | WV-2582 | 50 | SC, Day 1 | 10 | 5 | Day 3 |
| 6 | WV-2584 | 50 | SC, Day 1 | 10 | 5 | Day 3 |
| 7 | WV-2585 | 50 | SC, Day 1 | 10 | 5 | Day 3 |
| 8 | WV-2586 | 50 | SC, Day 1 | 10 | 5 | Day 3 |
| 9 | WV-2587 | 50 | SC, Day 1 | 10 | 5 | Day 3 |

[2125] Animals were euthanized via CO₂ asphyxiation 48 hours (+1 hour) after subcutaneous injection on Day 1. All animals were perfused using PBS. The following collected tissues (liver, kidney 2×, spleen, heart, thoracic diaphragm, gastrocnemius, quadriceps, and triceps) were rinsed briefly with PBS, gently blotted dry, snap frozen (liquid N2) in polypropylene tubes and stored at −70° C. until processing for further analysis.

[2126] Oligonucleotide quantification: Briefly, each mouse tissue was weighted and lysed in tissue lysis buffer.

### Hybridization Assay to Detect ASO: Sandwich

### Methods:

### Probe: Capture Probe: /5AmMC12/A+GA+AA+TG+CC+A (SEQ ID NO: 1832); Detection Probe: T+CT+TC+CT+TG+A/3Bio/(SEQ ID NO: 1833)

[2127] Plate: Coat Pierce@Amine-binding, Maleic Anhydride 96-Well Plates, with diluted Capture probe at 500 nM in 2.5% NaHCO₃, at 37° C. for at least 1 hour (or 4° C. overnight). After wash with PBST (1×PBS+0.1% Tween-20), block in 5% fat-free milk/PBST at 37° C. for >1 hour.

[2128] Tissue sample preparation: Weigh tissue pieces, add 4 volumes of lysis buffer to tissue to achieve 0.2 g tissue/mL, in tissue lysis buffer (IGEPAL 0.5%, 100 mM NaCl, 5 mM EDTA, 10 mM Tris pH8, protease K 300 μg/mL). The homogenate was generated by Bullet Blender (NextAdvance).

[2129] Standard Curve: Dilute Test Article into non-treated blank tissue homogenates (matrix) at 10-50 μg/mL (50-250 μg/g tissue). The standard was further serial diluted 1:1 with matrix for 8 points to form standard curve series.

[2130] Hybrid-ELISA: Dilute Standard Curve samples, treated tissue homogenates 100-500 times with hybridization buffer (4 M Guanidine; 0.33% N-Lauryl Sarcosine; 25 mM Sodium Citrate; 10 mM DTT). 20 μL of diluted tissue samples were mixed with 180 μL of detection probe diluted in PBST at 333 nM. Samples were denatured using following condition: 65° C., 10 min; 95° C., 15 min; 4° C., ∞. Add 50 μL/well denatured samples into coated 96 wells. Incubate at 4° C. for overnight. Wash plate 3 times with PBST. Add 1:2000 dilution of streptavidin-AP in PBST. Incubate at room temperature for 1 hour. Wash plate 5 times x 2 cycles with PBST on Molecular Device plate wash machine. Add 100 μL/well AttoPhos substrates. Incubate for 10 min, read plate at Molecular Device M5 in fluorescence channel: Ex435 nm, Em555 nm. Take another read at 20 min. Oligonucleotide concentration is calculated against Standard Curve by using either linear curve fit or 4-parameter curve fit.

[2131] Example test results were presented in the Figures, demonstrating that provided oligonucleotides have improved properties (e.g., distribution, metabolism, etc.).

### Example 3. Example Synthesis of Turbinaric Acid

[2132] Many types of acids, e.g., fatty acids, are widely known in the art and can be utilized in accordance with the present disclosure to incorporate various types of modifications. A person of ordinary skill in the art appreciates that various lipids, .e.g., fatty acids, are commercially available, and/or can be prepared using widely known and practiced technologies (e.g., reagents, methods, etc.), including those illustrated in the present disclosure. The present example describes preparation of turbinaric acid.

[chemical structure]

[2133] Synthesis of Turbinaric Acid: (4E,8E,12E,16E)-4,8,13,17,21-pentamethyldocosa-4,8,12,16,20-pentaenoic acid. Turbinaric acid has been previously described in, for example, Asari et al. 1989 J. Nat. Prod. 52: 1167-1169.

[2134] 2-Hydroxy-3-bromosqualene. To a solution of squalene (30.03 g, 73.1 mmol) in THF (210 mL), water (35 mL) was added and then a small amount of THF was added dropwise to obtain a clear solution under Argon. N-bromosuccinimide (15.62 g, 88 mmol) was added portion-wise at 0° C. and the reaction mixture was stirred at 0° C. for 30 minutes and at room temperature for 3 hrs. The solvent was removed under reduced pressure, and brine (500 mL) was added and extracted with EtOA (100 mL×5). The organic layer was dried over anhydrous sodium sulfate and concentrated to give a residue, which was purified by ISCO (220 g gold silica gel cartridge) eluting with hexane to 50% EtOAc in hexane (product was come out at 10-20% EtOAc in hexane) to give 2-hydroxy-3-bromosqualene (9.92 g, 19.54 mmol, 26.7% yield) as a pale yellowish oil. ¹H NMR (400 MHz, Chloroform-d) δ 5.24-5.05 (m, 5H), 3.98 (dd, J=11.3, 1.9 Hz, 1H), 2.35-2.32 (m, 1H), 2.16-1.90 (m, 18H), 1.85-1.70 (m, 1H), 1.67 (d, J=1.4 Hz, 3H), 1.60 (bs, 15H), 1.34 (s, 3H), 1.32 (s, 3H). MS (ESI), 551.1 and 553.3 (M+HCOO)⁻.

[2135] 2,2-Dimethyl-3-((3E,7E,I1E,15E)-3,7,12,16,20-pentamethylhenicosa-3,7,11,15,19-pentaen-1-yl)oxirane. To a solution of 2-hydroxy-3-bromosqualene (9.72 g, 19.15 mmol) in MeOH (360 mL), K₂CO₃ (5.29 g, 38.3 mmol) was added and the reaction mixture was stirred at room temperature for 2 hrs, filtered and then concentrated under reduced pressure. Then 300 mL EtOAc was added, and filtered, concentrated to give 2,3-oxidosqualene (8.38 g, 19.64 mmol, 100% yield) a colorless oil. ¹H NMR (400 MHz, Chloroform-d) δ 5.20-5.04 (m, 5H), 2.70 (t, J=7.0 Hz, 1H), 2.20-1.95 (m, 20H), 1.67 (s, 3H), 1.61 (s, 3H), 1.59 (bs, 15H), 1.29 (s, 3H), 1.25 (s, 3H).

[2136] (4E,8E,12E,16E)-4,8,13,17,21-pentamethyldocosa-4,8,12,16,20-pentaenal. To a solution of periodic acid (7.79 g, 34.2 mmol) in water (28 mL) at 0° C., a solution of 2,3-oxidosqualene (8.10 g, 18.98 mmol) in dioxane (65 mL) was added. The reaction mixture was stirred at room temperature for 2 hrs. Water (150 mL) was added and extracted with EtOAc (3×100 mL). The organic layer are dried over anhydrous sodium sulfate and concentrated under reduced pressure to give a residue, which was purified by ISCO (120 g gold silica gel cartridge) eluting with hexane to 10% EtOAc in hexane (product come out at 5-7% EtOAc in hexane to give (4E,8E,12E,16E)-4,8,13,17,21-pentamethyldocosa-4,8,12,16,20-pentaenal (5.80 g, 15.08 mmol, 79% yield) as a colorless oil. ¹H NMR (400 MHz, Chloroform-d) δ 9.74 (t, J=2.0 Hz, 1H), 5.18-5.04 (m, 5H), 2.50 (td, J=7.5, 2.0 Hz, 2H), 2.31 (t, J=7.5 Hz, 2H), 2.13-1.92 (m, 16H), 1.67 (s, 3H), 1.61 (s, 3H), 1.59 (bs, 12H).

[2137] Turbinaric Acid. Sulfuric acid (8.2 mL) followed by sodium dichromate dihydrate (4.42 g, 14.82 mmol) was added to HPLC water (80 mL) at 0° C. The above chromic acid solution was added dropwise to a solution of (4Z,8Z,12E,16E)-4,8,13,17,21-pentamethyldocosa-4,8,12,16,20-pentaenal (5.70 g, 14.82 mmol) in ethyl ether (115 mL) at 0° C. The reaction mixture was stirred at 0° C. for 2 hrs. After 2 hrs, TLC showed the reaction was complete (3: 1 hexane/EtOAc). The reaction mixture was diluted with EtOAc (300 mL), washed with brine (100 mL×4), dried over ahydrous, concentrated to give a residue, which was purified by ISCO (80 g silica gel cartridge) eluting with DCM to 5% MeOH in DCM to give turbinaric acid as a colorless oil (5.00 g, 84% yield). ¹H NMR (400 MHz, Chloroform-d) δ 5.18-5.07 (m, 5H), 2.44 (t, J=6.5 Hz, 2H), 2.30 (t, J=7.7 Hz, 2H), 2.13-1.93 (m, 16H), 1.67 (s, 3H), 1.59 (bs, 15H); MS (ESI), 399.3 (M−H)⁻.

### Example 4. Example Synthesis of 1,7,14-trioxo-12,12-bis((3-oxo-3-((3-(4-sulfamoylbenzamido)propyl)amino)propoxy)methyl)-1-(4-sulfamoylphenyl)-10-oxa-2,6,13-triazaoctadecan-18-oic Acid

[chemical structure]

[chemical structure]

[chemical structure]

[2138] Step 1: A solution of di-tert-butyl 3,3′-((2-amino-2-((3-(tert-butoxy)-3-oxopropoxy)methyl)propane-1,3-diyl)bis(oxy))dipropanoate (4.0 g, 7.91 mmol) and dihydro-2H-pyran-2,6(3H)-dione (0.903 g, 7.91 mmol) in THF (40 mL) was stirred at 50° C. for 3 hrs and at rt for 3 hrs. LC-MS showed desired product. Solvent was evaporated to give 5-((9-((3-(tert-butoxy)-3-oxopropoxy)methyl)-2,2,16,16-tetramethyl-4,14-dioxo-3,7,11,15-tetraoxaheptadecan-9-yl)amino)-S-oxopentanoic acid, which was directly used for next step without purification.

[2139] Step 2: To a solution of 5-((9-((3-(tert-butoxy)-3-oxopropoxy)methyl)-2,2,16,16-tetramethyl-4,14-dioxo-3,7,11,15-tetraoxaheptadecan-9-yl)amino)-S-oxopentanoic acid (4.90 g, 7.91 mmol) and (bromomethyl)benzene (1.623 g, 9.49 mmol) in DMF was added anhydrous K₂CO₃ (3.27 g, 23.73 mmol). The mixture was stirred at 40° C. for 4 hrs and at room temperature for overnight. Solvent was evaporated under reduced pressure. The reaction mixture was diluted with EtOAc, washed with water, dried over anhydrous sodium sulfate, and concentrated under reduced pressure to give a residue, which was purified by ISCO eluting with 10% EtOAc in hexane to 50% EtOAc in hexane to give di-tert-butyl 3,3′-((2-(5-(benzyloxy)-S-oxopentanamido)-2-((3-(tert-butoxy)-3-oxopropoxy)methyl)propane-1,3-diyl)bis(oxy))dipropanoate (5.43 g, 7.65 mmol, 97% yield) as a colorless oil. ¹H NMR (400 MHz, Chloroform-d) δ 7.41-7.28 (m, 5H), 6.10 (s, 1H), 5.12 (s, 2H), 3.72-3.60 (m, 12H), 2.50-2.38 (m, 8H), 2.22 (t, J=7.3 Hz, 2H), 1.95 (p, J=7.4 Hz, 2H), 1.45 (s, 27H); MS (ESI), 710.5 (M+H)+.

[2140] Step 3: A solution of di-tert-butyl 3,3′-((2-(5-(benzyloxy)-S-oxopentanamido)-2-((3-(tert-butoxy)-3-oxopropoxy)methyl)propane-1,3-diyl)bis(oxy))dipropanoate (5.43 g, 7.65 mmol) in formic acid (50 mL) was stirred at room temperature for 48 hrs. LC-MS showed the reaction was not complete. Solvent was evaporated under reduced pressure. The crude product was re-dissolved in formic acid (50 mL) and was stirred at room temperature for 6 hrs. LC-MS showed the reaction was complete. Solvent was evaporated under reduced pressure, co-evaporated with toluene (3×) under reduced pressure, and dried under vacuum to give 3,3′-((2-(5-(benzyloxy)-5-oxopentanamido)-2-((2-carboxyethoxy)methyl)propane-1,3-diyl)bis(oxy))dipropanoic acid (4.22 g, 7.79 mmol, 100% yield) as a white solid. ¹H NMR (500 MHz, DMSO-d₆) δ 12.11 (s, 3H), 7.41-7.27 (m, 5H), 6.97 (s, 1H), 5.07 (s, 2H), 3.55 (d, J=6.4 Hz, 6H), 2.40 (t, J=6.3 Hz, 6H), 2.37-2.26 (m, 2H), 2.08 (t, J=7.3 Hz, 2H), 1.70 (p, J=7.4 Hz, 2H); MS (ESI), 542.3 (M+H)⁺.

[2141] Step 4: To a solution of 3,3′-((2-(5-(benzyloxy)-S-oxopentanamido)-2-((2-carboxyethoxy)methyl)propane-1,3-diyl)bis(oxy))dipropanoic acid (4.10 g, 7.57 mmol) and HOBt (4.60 g, 34.1 mmol) in DCM (60 mL) and DMF (15 mL) at 0° C. was added tert-butyl (3-aminopropyl)carbamate (5.94 g, 34.1 mmol), EDAC HCl salt (6.53 g, 34.1 mmol) and DIPEA (10.55 mL, 60.6 mmol). The reaction mixture was stirred at 0° C. for 15 minutes and at room temperature for 20 hrs. LC-MS showed the reaction was not complete. EDAC HCl salt (2.0 g) and tert-butyl (3-aminopropyl)carbamate (1.0 g) was added into the reaction mixture. The reaction mixture was stirred at room temperature for 4 hrs. Solvent was evaporated to give a residue, which was dissolved in EtOAc (300 mL), washed with water (1×), saturated sodium bicarbonate (2×), 10% citric acid (2×) and water, dried over sodium sulfate, and concentrated to give a residue which was purified by ISCO (80 g gold cartridge) eluting with DCM to 30% MeOH in DCM to give benzyl 15,15-bis(13,13-dimethyl-5,11-dioxo-2,12-dioxa-6,10-diazatetradecyl)-2,2-dimethyl-4,10,17-trioxo-3,13-dioxa-5,9,16-triazahenicosan-21-oate 5 (6.99 g, 6.92 mmol, 91% yield) as a white solid. ¹H NMR (500 MHz, Chloroform-d) δ 7.35 (t, J=4.7 Hz, 5H), 6.89 (s, 3H), 6.44 (s, 1H), 5.22 (d, J=6.6 Hz, 3H), 5.12 (s, 2H), 3.71-3.62 (m, 12H), 3.29 (q, J=6.2 Hz, 6H), 3.14 (q, J=6.5 Hz, 6H), 2.43 (dt, J=27.0, 6.7 Hz, 8H), 2.24 (t, J=7.2 Hz, 2H), 1.96 (p, J=7.5 Hz, 2H), 1.69-1.59 (m, 6H), 1.43 (d, J=5.8 Hz, 27H); MS (ESI): 1011.5 (M+H)+.

[2142] Step 5: To a solution of benzyl 15,15-bis(13,13-dimethyl-5,11-dioxo-2,12-dioxa-6,10-diazatetradecyl)-2,2-dimethyl-4,10,17-trioxo-3,13-dioxa-5,9,16-triazahenicosan-21-oate (1.84 g, 1.821 mmol) in DCM (40 mL) was added 2,2,2-trifluoroacetic acid (7.02 mL, 91 mmol). The reaction mixture was stirred at room temperature for overnight. Solvent was evaporated to give benzyl 5-((1,19-diamino-10-((3-((3-aminopropyl)amino)-3-oxopropoxy)methyl)-5,15-dioxo-8,12-dioxa-4,16-diazanonadecan-10-yl)amino)-S-oxopentanoate as a colorless oil. MS (ESI), 710.6 (M+H)⁺.

[2143] Step 6: To a solution of 4-sulfamoylbenzoic acid (1.466 g, 7.28 mmol) in DCM (40 mL) was added HATU (2.77 g, 7.28 mmol) followed by benzyl 5-((1,19-diamino-10-((3-((3-aminopropyl)amino)-3-oxopropoxy)methyl)-5,15-dioxo-8,12-dioxa-4,16-diazanonadecan-10-yl)amino)-S-oxopentanoate (1.293 g, 1.821 mmol) in DMF (4.0 mL). The mixture was stirred at room temperature for 5 hrs. Solvent was evaporated under reduced pressure to give a residue, which was purified by ISCO (40 g gold column) eluting with DCM to 50% MeOH in DCM to give benzyl 1,7,14-trioxo-12,12-bis((3-oxo-3-((3-(4-sulfamoylbenzamido)propyl)amino)-propoxy)methyl)-1-(4-sulfamoylphenyl)-10-oxa-2,6,13-triazaoctadecan-18-oate (0.36 g, 0.286 mmol, 16% yield). ¹H NMR (400 MHz, DMSO-d₆) δ 8.60 (t, J=5.6 Hz, 3H), 7.96-7.81 (m, 15H), 7.44 (s, 6H), 7.35-7.23 (m, 5H), 7.04 (s, 1H), 5.02 (s, 2H), 3.50 (t, J=6.9 Hz, 6H), 3.48 (s, 6H), 3.23 (q, J=6.6 Hz, 6H), 3.06 (q, J=6.6 Hz, 6H), 2.29 (t, J=7.4 Hz, 2H), 2.24 (t, J=6.5 Hz, 6H), 2.06 (t, J=7.4 Hz, 2H), 1.69-1.57 (m, 8H).

[2144] Step 7: To a round bottom flask flushed with Ar was added 10% Pd/C (80 mg, 0.286 mmol) and EtOAc (15 mL). A solution of benzyl 1,7,14-trioxo-12,12-bis((3-oxo-3-((3-(4-sulfamoylbenzamido)propyl)amino)propoxy)methyl)-1-(4-sulfamoylphenyl)-10-oxa-2,6,13-triazaoctadecan-18-oate (360 mg) in methanol (15 mL) was added followed by diethyl(methyl)silane (0.585 g, 5.72 mmol) dropwise. The mixture was stirred at room temperature for 3 hrs. LC-MS showed the reaction was complete. The reaction was diluted with EtOAc, and filtered through celite, washed with 20% MeOH in EtOAc, and concentrated under reduced pressure to give 1,7,14-trioxo-12,12-bis((3-oxo-3-((3-(4-sulfamoylbenzamido)propyl)-amino)propoxy)methyl)-1-(4-sulfamoylphenyl)-10-oxa-2,6,13-triazaoctadecan-18-oic acid (360 mg, 100% yield) as a white solid. ¹H NMR (400 MHz, DMSO-d₆) δ 8.60 (t, J=5.6 Hz, 3H), 7.94-7.81 (m, 15H), 7.44 (s, 6H), 7.04 (s, 1H), 3.50 (t, J=6.9 Hz, 6H), 3.48 (s, 6H), 3.23 (q, J=6.6 Hz, 6H), 3.06 (q, J=6.6 Hz, 6H), 2.24 (t, J=6.4 Hz, 6H), 2.14 (t, J=7.5 Hz, 2H), 2.05 (t, J=7.4 Hz, 2H), 1.66-1.57 (m, 8H); MS (ESI), 1170.4 (M+H)⁺.

### Example 5. Example Synthesis of 2-Cyanoethyl ((6Z,9Z,28Z,31Z)-Heptatriaconta-6,9,28,31-Tetraen-19-Yl) Diisopropylphosphoramidite and Synthesis of Amidite from Lauryl Alcohol

[2145] As appreciated by a person having ordinary skill in the art, various alcohols can be converted into phosphoramidites and conjugated to oligonucleotide chains using known technologies in the art in accordance with the present disclosure. The present example illustrates preparation of 2-cyanoethyl ((6Z,9Z,28Z,31Z)-heptatriaconta-6,9,28,31-tetraen-19-yl) diisopropylphosphoramidite, which can be used to, e.g., prepare oligonucleotides comprising Mod021.

[chemical structure]

Synthesis of (9Z,12Z)-octadeca-9,12-dien-1-yl methanesulfonate (or linoleyl methanesulfonate). To a solution of linoleyl alcohol (23.31 mL, 75 mmol) and triethylamine (13.60 mL, 98 mmol) in DCM (150 mL) at 0° C. was added methanesulfonyl chloride (6.39 mL, 83 mmol) dropwise. The reaction mixture was stirred at 0° C. for 30 minutes and at room temperature for 3 hrs. The reaction mixture was diluted with DCM (200 mL), washed with water, sat sodium bicarbonate and brine and dried over ahydrous sodium sulfate. Solvent was concentrated to give linoleyl methanesulfonate (26.17 g, 100% yield) as an yellowish oil. Without further purification, the product was directly used for next step. ¹H NMR (500 MHz, Chloroform-d) δ 5.30-5.41 (m, 4H), 4.22 (t, J=6.6 Hz, 2H), 2.99 (s, 3H), 2.77 (t, J=6.7 Hz, 2H), 2.05 (q, J=6.9 Hz, 4H), 1.74 (p, J=6.7 Hz, 2H), 1.43-1.25 (m, 16H), 0.89 (t, J=6.7 Hz, 3H).

[2146] Synthesis of linoleyl bromide. To a solution of linoleyl methanesulfonate (26 g, 75 mmol) in ether (800 mL) was added magnesium bromide ethyl etherate (58.5 g, 226 mmol) under Argon. The reaction mixture was stirred at room temperature for 2 hrs. TLC was used to monitor reaction progress. If not completed, additional magnesium bromide ethyl etherate (14.5 g) was added the reaction mixture and the reaction mixture was stirred at room temperature for 22 hrs. TLC showed the reaction was complete (9/1 hexane/EtOAc). The reaction mixture was filtered, washed with ether (200 mL), hexane (100 mL), and concentrated under reduced pressure to give a residue, which was purified by ISCO (200 g gold silica gel cartridge) eluted with hexane to 10% EtOAc in hexane to give linoleyl bromide (22.8 g, 69.2 mmol, 92% yield) as a colorless oil. ¹H NMR (500 MHz, Chloroform-d) δ 5.42-5.31 (m, 4H), 3.41 (t, J=6.9 Hz, 2H), 2.77 (t, J=6.6 Hz, 2H), 2.05 (q, J=6.9 Hz, 4H), 1.85 (p, J=6.9 Hz, 2H), 1.43-1.25 (m, 16H), 0.89 (t, J=6.8 Hz, 3H).

[2147] Synthesis of dilinoleyl methanol. To a suspension of Mg (0.897 g, 36.9 mmol) and ether (20 mL) in RB flask was added linoleyl bromide (10.0 g, 30.4 mmol) in ether (25 mL) dropwise while keeping the reaction under gentle reflux by cooling the RB flask in water. The reaction mixture was stirred at 35° C. for 1 hour. To the above reaction mixture at 0° C. was added ethyl formate (1.013 g, 13.68 mmol) in ether (30 mL) dropwise for 10 minutes and the reaction mixture was stirred at room temperature for 1.5 hrs. The reaction mixture was cooled in ice bath, quenched with water (30 mL), treated with 10% H₂SO₄ (150 mL) until the solution became homogeneous and the layer was separated. The aqueous layer was extracted with ether (200 mL×2). The solvent was evaporated under reduced pressure to give a residue, which was re-dissolved in THF (50 mL) and 1 N NaOH (30 mL). The reaction mixture was stirred at 40° C. for 5 hrs. TLC was used to monitor the reaction progress. If not complete, 1.5 g NaOH was added to the reaction mixture and the reaction mixture was continually stirred at 40° C. for overnight. The reaction mixture was extracted with ether (2×), dried over anhydrous sodium sulfate, and concentrated to give a residue, which was purified by ISCO (120 g gold silica gel cartridge) eluting with hexane to 10% EtOAc in hexane to give dilinoleyl methanol (5.16 g, 9.76 mmol, 71.3% yield) as a colorless oil. ¹H NMR (500 MHz, Chloroform-d) δ 5.41-5.30 (m, 8H), 3.58 (s, 1H), 2.77 (t, J=6.7 Hz, 4H), 2.05 (q, J=6.9 Hz, 8H), 1.49-1.25 (m, 40H), 0.89 (t, J=6.8 Hz, 6H).

[2148] Synthesis of 2-cyanoethyl ((6Z,9Z,28Z,31Z)-heptatriaconta-6,9,28,31-tetraen-19-yl) diisopropylphosphoramidite. To a solution of dilinoleyl methanol (2.5 g, 4.73 mmol) in anhydrous dichloromethane (30 mL) at room temperature was added DIPEA (4.12 mL, 23.63 mmol) and 3-(chloro(diisopropylamino)phosphino)propanenitrile (1.180 mL, 5.67 mmol). The reaction mixture was stirred at room temperature for 2 hours. The reaction mixture was added EtOAc (300 mL), washed with sat sodium bicarbonate, dried over anhydrous sodium sulfate, and concentrated under reduced pressure to give a residue, which was purified by ISCO (40 g gold silica gel cartridge) eluting with hexane to 5% EtOAc in hexane containing 5% TEA to give 2-cyanoethyl (6Z,9Z,28Z,31Z)-heptatriaconta-6,9,28,31-tetraen-19-yl diisopropylphosphoramidite (2.97 g, 4.07 mmol, 86% yield) as a colorless oil. ¹H NMR (500 MHz, Chloroform-d) δ 5.30-5.41 (m, 8H), 3.85-3.72 (m, 3H), 3.59 (dp, J=10.2, 6.8 Hz, 2H), 2.77 (t, J=6.8 Hz, 4H), 2.61 (t, J=6.6 Hz, 2H), 2.05 (q, J=7.1 Hz, 8H), 1.60-1.46 (m, 4H), 1.42-1.27 (m, 36H), 1.18 (dd, J=6.8, 3.0 Hz, 12H), 0.89 (t, J=6.8 Hz, 6H). ³¹P NMR (202 MHz, Chloroform-d) δ 147.68.

[2149] Synthesis of amidite from lauryl alcohol. To a solution of lauryl alcohol (5.2 g, 28 mmol) in 60 mL dry DCM, under an atmosphere of argon, at room temperature was added DIPEA (18 g, 140 mmol) and stirred for 5 minutes. To this solution was added 2-cyanoethyl N,N-diisopropylchlorophosphoramidite (7.9 g, 33.5 mmol) dropwise and stirred for 4 hours. Solvent from the reaction mixture was evaporated under reduced pressure, diluted with 300 mL ethyl acetate, washed with sat. NaHCO₃ and dried over anhydrous sodium sulfate. Removal of solvent and column chromatography over silica gel (80 g regular silica, 0-30% ethyl acetate in hexane containing 5% triethyl amine) using ISCO provided the product. Weight of product obtained: 3.8 g (35%). ¹H NMR (500 MHz; CDCl₃): δ 3.88-3.76 (m, 2H), 3.68-3.55 (m, 4H), 2.62 (t, 2H), 1.62-1.35 (m, 2H), 1.32-1.28 (m, 18H), 1.19-1.17 (m, 12H), 0.87 (t, 3H). ³¹P NMR (202.4 MHz; CDCl₃): δ 147.2 (s). The product was utilized to incorporate Mod030 using oligonucleotide synthesis chemistry by reacting with 5′-OH of oligonucleotide chain. Similar procedures were employed for Mod031, Mod032, and Mod033.

### Example 6. Example Synthesis of Amidites for Mod030-Mod033

[2150] To a solution of lauryl alcohol (5.2 g, 28 mmol) in 60 mL dry DCM, under an atmosphere of argon, at room temperature was added DIPEA (18 g, 140 mmol) and stirred for 5 minutes. To this solution was added 2-cyanoethyl N,N-diisopropylchlorophosphoramidite (7.9 g, 33.5 mmol) dropwise and stirred for 4 hours. Solvent from the reaction mixture was evaporated under reduced pressure, diluted with 300 mL ethyl acetate, washed with sat. NaHCO₃ and dried over anhydrous sodium sulfate. Removal of solvent and column chromatography over silica gel (80 g regular silica, 0-30% ethyl acetate in hexane containing 5% triethyl amine) using ISCO afforded the product. Weight of product obtained: 3.8 g (35%). ¹H NMR (500 MHz; CDCl₃): δ 3.88-3.76 (m, 2H), 3.68-3.55 (m, 4H), 2.62 (t, 2H), 1.62-1.35 (m, 2H), 1.32-1.28 (m, 18H), 1.19-1.17 (m, 12H), 0.87 (t, 3H). ³¹P NMR (202.4 MHz; CDCl₃): δ 147.2 (s). Amidites for Mod031, Mod032 and Mod033 were prepared using the same procedure. These amidites were used as the last amidite in the synthesis cycle to prepare oligonucleotides comprising Mod030-Mod033.

### Example 7. Example Preparation of Acid for Mod024

[chemical structure]

[2151] GlucNAc acid 1 (WO 2014/025805 A1) (1.88 g, 4.2 mmol) and HOBT (0.73 g, 5.4 mmol) was stirred in anhydrous DMF-DCM mixture (11+15 mL) under nitrogen at room temperature for 10 minutes. HBTU (2.05 g, 5.4 mmol) was added followed by DIPEA (2.17 g, 16.8 mmol) at 10° C. To this solution was added tri-amine salt 2 (WO 2014/025805 A1) (1.38 g, 1.2 mmol) and stirred overnight. Solvent was removed under vacuum and the residue was dissolved in ethyl acetate (200 mL). To this solution was added 100 ml of a mixture of sat. ammonium chloride, sat. sodium chloride, sat. sodium bicarbonate and water (1:1:1:1). The ethyl acetate layer was turbid initially. After thoroughly shaking the layers got separated. Aqueous layer was extracted with ethyl acetate (×2). Combined organic fractions were washed with brine and dried over anhydrous sodium sulfate. Solvent removal under reduced pressure afforded 490 mg of crude product. This product was purified by CC on an ISCO machine. The eluent was DCM-Methanol (0-20% methanol in DCM). Amount of product obtained was 1.26 g (50%). LC-MS (+mode): 1768 (M-1GlucNAc), 1438 (M-2 GlucNAc), 1108 (M-3 GlucNAc), 1049 (M/2 +1).

[chemical structure]

[2152] To a solution of benzyl ester 4 (0.25 g, 0.119 mmol) in 7 mL dry methanol, under an atmosphere of argon, 10% Pd/C (50 mg) was added followed by 1.5 mL (9.4 mmol) triethylsilane (TES) drop wise. A vigorous reaction set in and the RM was stirred for 3 hours. LC-MS analysis of the product indicates completion of reaction. The RM was filtered over celite and solvent was removed under vacuum. The crude product was triturated (×3) with ether-methanol (3:1) mixture and dried under vacuum. This product 5 was used for conjugation with oligonucleotide chains without further purification, and after conjugation the hydroxyl groups were deprotected, for example, during cleavage and/or deprotection of oligonucleotides to incorporate Mod024. If desired, a number of protocols can be utilized to deprotect the hydroxyl groups in 5 to provide the acid with deprotected hydroxyl groups. ¹H NMR (500 MHz, DMSO-D6): δ 7.90 (3H, d, J=10 Hz), 7.80 (t, 3H), 7.70 (t, 3H), 5.03 (t, 3H), 4.77 (t, 3H), 4.54 (3H, d, J=10 Hz), 4.14 (3H, dd, J₁=9 Hz, J₂=5 Hz), 3.97-3.93 (m, 3H), 3.79-3.74 (m, 3H), 3.69-3.61 (m, 6H), 3.51-3.47 (m, 3H), 3.40-3.35 (m, 3H), 3.31 (d, 3H, J=9 Hz), 2.98 (m, 12H), 2.23 (t, 3H), 2.13 (t, 3H), 2.01-1.99 (m, 3H), 1.97 (s, 9H), 1.92 (s, 9H), 1.86 (s, 9H), 1.71 (s, 9H), 1.49-1.32 (m, 22H), 1.18 (br s, 12H). Mod026 were incorporated using similar strategies.

### Example 8. Example Procedure for Conjugation—Preparing Oligonucleotide Chains with Amino Groups

[2153] As appreciated by a person having ordinary skill in the art, various technologies, e.g., linkers, methods, functional groups, etc. can be utilized to prepare provided oligonucleotides in accordance with the present disclosure, including those comprising lipid moieties and/or targeting components. Below are example procedures for preparing oligonucleotides with amino groups for incorporating various moieties, e.g., lipid moieties, targeting components, etc.

### “On Support” Conjugation Strategy

[2154] Preparation of 5′-amino-modified oligonucleotides for “on support” conjugation was carried out using MMT-amino C6 CE phosphoramidite (ChemGenes Corporation catalog No. CLP-1563 or Glen Research catalog No. 10-1906), which was added as the last phosphoramidite and coupled to 5′-OH of the oligonucleotide chain on solid support using oligonucleotide synthesis chemistry. After coupling, the newly formed linkage was optionally oxidized to provide a phosphodiester linkage if desired using, for example, tert-butyl hydroperoxide (e.g., 1.1 M in 20:80 decane/dichloromethane), I₂ (e.g., in pyridine/water, THF/pyridine/water, etc.), etc., depending on the oligonucleotide synthesis chemistry. When a phosphorothioate linkage was desired, PolyOrg Sulfa (e.g., 0.1 M in acetonitrile) or DDTT (e.g., 0.1 M in pyridine) was used for sulfurization. The MMT protecting group was then removed while the oligonucleotide was on support with deblocking reagent (e.g., 3% trichloroacetic acid in dichloromethane, 3% dichloroacetic acid in toluene, etc.) until the yellow color was no longer observed. Various compounds, e.g., fatty acids, sugar acids, etc. were then coupled, and optionally followed by cleavage from the support, deprotection and/or purification.

### “in Solution” Conjugation Strategy

[2155] Preparation of 5′-amino-modified oligonucleotides for “in solution” conjugation strategy was carried out using TFA-amino C6 CED phosphoramidite (ChemGenes Corporation catalog No. CLP-1553 or Glen Research catalog No. 10-1916), which was added as the last phosphoramidite and coupled to 5′-OH of the oligonucleotide chain on solid support using oligonucleotide synthesis chemistry. After coupling, the newly formed linkage was optionally oxidized to provide a phosphodiester linkage if desired using, for example, tert-butyl hydroperoxide (e.g., 1.1 M in 20:80 decane/dichloromethane), I2 (e.g., in pyridine/water, THF/pyridine/water, etc.), etc., depending on the oligonucleotide synthesis chemistry. When a phosphorothioate linkage was desired, PolyOrg Sulfa (e.g., 0.1 M in acetonitrile) or DDTT (e.g., 0.1 M in pyridine) was used for sulfurization. The amine-modified oligonucleotides were then cleaved from the support, deprotected and purified to provide products with free amino groups for conjugation. Usually the TFA group was removed during cleavage and deprotection of the oligonucleotides. The oligonucleotides were then utilized for conjugation

### Example 9. Example Procedure for Conjugation on Solid Support

[2156] As appreciated by a person having ordinary skill in the art, a number of widely known and practiced technologies, e.g., reagents, methods, etc., can be utilized to prepare provided oligonucleotide compositions, including those comprising lipid moieties, in accordance with the present disclosure. Two example schemes are provided in the present and following examples for illustration of conjugation of lipids, targeting components, etc. to oligonucleotides. In some embodiments, R^{LD}—COOH is a fatty acid as described herein (prepared and/or commercially available) to provide R^{LD} as illustrated in provided oligonucleotides, e.g., certain example oligonucleotides in Table 4. In some embodiments, R^{LD}—COOH is an acid comprising targeting component (prepared and/or commercially available) as described herein to provide R^{LD} as illustrated in provided oligonucleotides, e.g., certain example oligonucleotides in Table 4.

[2157] Example procedure for conjugation on solid support:

[chemical structure]

[2158] In an example procedure, a mixture of a lipid acid (1 gmol, 1 eq.), HATU (0.9 eq), diisopropylethylamine (10 eq) and NMP (500 μl) was shaken well at room temperature for 10 minutes, in a 3 mL plastic vial. This activated acid was pipetted into a plastic vial containing oligonucleotides (e.g., see example above) on solid support (0.09 gmol, 0.9 eq). The contents of the vial was thoroughly mixed and shaken well for 12 hours. After this time the supernatant NMP was removed carefully. The solid support was washed with acetonitrile (1 mL×3) and dried in a speed vac. A 1:1 mixture (1 mL) of ammonium hydroxide and methyl amine (AMA) was added and heated at 35° C. for 1 hour with intermittent shaking. After 1 hour, the CPG was transferred into a small filtration cartridge, filtered, washed with DMSO (500 μl×2) and washed with water (1 mL×3). Filtrate and washings were combined and diluted to 10 mL using water. This solution was cooled to 0° C. and neutralized with glacial acetic acid until pH of the solution reached 7.5. (Alternatively the dried solid support can be treated with 35% NH₄OH at 60° C. for 12 hours, cooled, filtered and neutralized with glacial acetic acid. For oligos containing fluoro group at 2′ position, a mixture of 35% ammonium hydroxide and ethanol (3:1) was used with temperature not exceeding 40° C.). Crude product was analyzed by UV spectrometer, reverse phase HPLC and LC-MS. Purification of the crude product was done by RP-HPLC. After HPLC purification each fraction was analyzed by RP-HPLC and LC-MS. Pure fractions were combined and solvent was removed under vacuum (speed vac). Residue was dissolved in water and desalted (Triethyl ammonium ion was replaced with sodium ion) on a C-18 cartridge. Solvent was removed on a speed vaac and the residue was filtered through a centrifugal filter (Amicon Ultra-15 by Millipore), lyophilized and analyzed.

[2159] For example, for synthesis of WV-2578, a mixture of lauric acid (11.01 mg, 0.0549 mmol), HATU (19 mg, 0.050 mmol) and diisopropylethyl amine (18 μL, 0.1 mmol) was dissolved in 500 μL of dry NMP and shaken well for five minutes. This activated acid was pipetted into a plastic vial containing oligonucleotides on solid support (70.5 mg, 0.005 mmol). The contents of the vial was thoroughly mixed and shaken well for 12 hours. After this time supernatant NMP was removed carefully. The solid support was washed with acetonitrile (1 mL×3) and dried in a speed vac. A 1:1 mixture (1 mL) of ammonium hydroxide and methyl amine (AMA) was added and heated at 35° C. for 1 hour with intermittent shaking. After 1 hour, the CPG was transferred into a small filtration cartridge, filtered, washed with DMSO (500 μL×2) and washed with water (1 mL×3). Filtrate and washings were combined and diluted to 10 mL using water. This solution was cooled to 0° C. and neutralized with glacial acetic acid until pH of the solution reached 7.5. Purification of the crude product was done by RP-HPLC. After HPLC purification each fraction was analyzed by RP-HPLC and LC-MS. Pure fractions were combined and solvent was removed under vacuum (speed vac). Residue was dissolved in water and desalted (triethyl ammonium ion was replaced with sodium ion) on a C-18 cartridge. Solvent was removed on a speed vac and the residue was filtered through a centrifugal filter (Amicon Ultra-15 by Millipore), lyophilized and analyzed. Average mass of WV2578 calculated: 7355, found (deconvoluted mass):7358. Additional examples include:

| EXP* | CPG (5 μmol) | Acid (55 μmol) |
|---|---|---|
| 1 | 70.5 | Lauric acid (MW = 200.32) 11.01 mg |
| 2 | 70.5 | Myristic Acid (MW = 228.38) 12.56 mg |
| 3 | 70.5 | Palmitic acid (MW = 256.26) 14.1 mg |
| 4 | 70.5 | Stearic acid (MW = 284.27) 15.63 mg |
| 5 | 70.5 | Oleic acid (MW = 282.47) 15.53 g |
| 6 | 70.5 | Linolenic acid (MW = 280.45) 15.4 mg |
| 7 | 70.5 | α-Linolenic acid (MW = 278.44) 15.3 mg |
| 8 | 70.5 | γ-Linolenic acid (MW = 278.44) 15.3 mg |
| 9 | 70.5 | cis-DHA (MW = 328.24) 18.05 mg |
| 10 | 70.5 | Turbinaric acid(MW = 400.36) 22 mg |

*HATU (50 μmol, MW = 379.24, 19 mg), DIPEA (MW = 129, d = 0.726, 100 μmol, 18 μL), NMP (500 μL). Example products include (Total ODs and Amount of lipid conjugates after purification):

| | | Total | Amount | Amount |
|---|---|---|---|---|
| Oligonucleotide | Conjugated Acid | ODs | (μmol) | (mg) |
| WV2578 | Lauric Acid | 287 | 1.40 | 9.79 |
| WV2579 | Myristic Acid | 331 | 1.62 | 11.29 |
| WV2580 | Palmitic Acid | 268 | 1.31 | 9.14 |
| WV2581 | Stearic Acid | 265 | 1.30 | 9.04 |
| WV2582 | Oleic Acid | 262 | 1.28 | 8.94 |
| WV2583 | Linoleic Acid | 120 | 0.59 | 4.09 |
| WV2584 | α-Linolenic Acid | 285 | 1.39 | 9.72 |
| WV2585 | γ-Linolenic Acid | 297 | 1.45 | 10.13 |
| WV2586 | cis-DHA | 274 | 1.34 | 9.35 |
| WV2587 | Turbinaric acid | 186 | 0.91 | 6.35 |
| WV2588 | Dilinoleyl* | 345 | 1.69 | 11.77 |

*Synthesized on a solid support; last cycle using 2-cyanoethyl ((6Z,9Z,28Z,31Z)-heptatriaconta-6,9,28,31-tetraen-19-yl) diisopropylphosphoramidite.

### Example 10. Example Procedure for Conjugation in Solution

[2160] In some embodiments, provided oligonucleotides were prepared in solution phase.

[2161] Example procedure for conjugation in liquid phase:

[chemical structure]

[2162] In an example procedure, a mixture of the lipid acid (1 eq.), HATU (1 eq.) and DIPEA (10 eq.) was mixed well in dry AcCN (10 mL) and kept for 10 minutes. This activated acid was added to the oligonucleotide (5 mol) in water (5 mL) and mixed well on a vortex. This reaction was shaken for 1 hour. After 1 hour completion of the reaction was checked by LC-MS (usually the reaction is complete in 1 hour; if not, more acid-HATU complex can be added to drive the reaction to completion). Acetonitrile and water was removed under vacuum on a speed vac. The solid obtained was treated with 35% ammonium hydroxide (15 mL) and shaken at 60° C. for 12 hours; for 2′ fluro oligonucleotides a 3:1 mixture of 35% ammonium hydroxide and ethanol was used for deprotection). After 12 hours solvent was removed under vacuum and diluted with water (15 mL), analyzed by LC-MS and RP-HPLC. Crude product was then purified by RP-HPLC and desalted.

[2163] For example, for synthesis of WV-3546, turbinaric acid (7 mg, 0.0174 mmol), HATU (6.27 mg, 0.0165 mmol) and DIPEA (22.2 mg, 0.172 mmol) was mixed well in dry AcCN (10 mL) and kept for 5 minutes in a 40 mL plastic vial. This activated acid was added to oligonucleotides in 3.77 mL water (80 mg, 0.0117 mmol) and mixed well on a vortex. This reaction was shaken for 2 hours. After 2 hours completion of the reaction was checked by LC-MS (reaction was complete). Acetonitrile and water was removed under vacuum on a speed vac. The solid obtained was treated with ammonia:ethanol mixture (3:1, 15 mL) and shaken at 40° C. for 12 hours. After 12 hours solvent was removed under vacuum and diluted with water (-15 mL) and analyzed by LC-MS. Crude product was purified by RP-HPLC (50 mM triethyl ammonium acetate in water-acetonitrile system (0-70% acetonitrile in 45 minutes), X Bridge preparative C8 (19×250 mm column)). Average mass of WV3546 calculated: 7295. Mass found (deconvoluted mass): 7295.

### Example 11. Example Synthesis of MMT-C6-Amino DPSE-L Amidite

[chemical structure]

[2164] Preparation of chlorooxazaphospholidine: L-DPSE (37.1 g, 119 mmol) was dried by azeotropic evaporation with anhydrous toluene (150 mL) at 35° C. in a rotoevaporator and left in high vacuum for overnight. Then a solution of this dried L-DPSE (37.1 g) and 4-methylmorpholine (26.4 mL, 24.31 g, 240 mmol) dissolved in anhydrous toluene (150 mL) was added to an ice-cold solution of trichlorophosphine (16.51 g, 10.49 mL, 120 mmol) in anhydrous toluene (110 mL) placed in three neck round bottomed flask through cannula under Argon (start Temp: 0.6° C., Max: temp 14° C., 25 min addition) and the reaction mixture was stirred at 0° C. for 40 min. After that the precipitated white solid was filtered by vacuum under argon using spacial filter tube (Chemglass: Filter Tube, 24/40 Inner Joints, 80 mm OD Medium Frit, Airfree, Schlenk). The solvent was removed by rotaevaporator under argon at low temperature (25° C.) followed by dried under vacuum overnight (-15 h) and the oily chlorooxazaphospholidine obtained was used for the next step.

[2165] MMT-C6-amino DPSE-L amidite: 6-(monomethoxytritylamino)hexan-1-ol (7.0 g, 17.97 mmol) was first dried by azeotropic evaporation by anhydrous toluene (50 ml) and dried under vacuum for overnight. Then the dried 6-(monomethoxytritylamino)hexan-1-ol was dissolved in anhydrous THF (80 mL) and added triethylamine (9.0 g, 90 mmol) and then the reaction solution was cooled to −70° C. To this cooled solution was added chlorooxazaphospholidine (6.76 g, 17.97 mmol) dissolved in anhydrous THF(50 mL) over 10 min. After the reaction mixture slowly warmed to room temperature (-lh), TLC indicated complete conversion of starting material. Then the reaction mixture was filtered carefully under vacuum/argon using the fitted filtration tube to remove precipitated solid, and washed with THF (80 mL). The solution was evaporated at 25° C. and the resulting oily residue was dissolved in Hexane-CH₂Cl₂ mixture with 5% TEA and purified using ISCO Combi-Flash system 220 g silica column (which was pre-de-activated with 3 CV MeOH, then equilibrated with ethyl acetate (5% TEA) 3 CV), with Hexane-EtOAc mixture (5% TEA). Pure fractions were collected and concentrated, dried overnight to afford MMT-C6-amino DPSE-L amidite as a colorless oily liquid. Yield: 8.0 g (62%). MS: calculated: 728.38; found by LCMS analysis at +Ve ion mode m/z: 729.54 (M⁺ ion), 747.50 (M⁺+18, H2O). ¹H-NMR (500 MHz, CDCl₃): δ 7.58-7.43 (m, 8H), 7.41-7.31 (m, 6H), 7.31-7.23 (m, 6H), 7.17 (t, J=7.2 Hz, 2H), 6.81 (d, J=8.7 Hz, 2H), 4.82 (dt, J=8.7, 5.7 Hz, 1H), 3.78 (s, 3H), 3.77-3.73 (m, 1H), 3.54 (qt, J 11.0, 5.2 Hz, 2H), 2.54 (q, J=7.2 Hz, 3H), 2.11 (t, J=7.0 Hz, 2H), 1.64-1.57 (m, 4H), 1.51-1.35 (m, 6H), 1.26 (q, J=9.9, 8.0 Hz, 2H), 1.04 (t, J=7.1 Hz, 2H), 0.67 (s, 3H). ¹³C NMR (500 MHz, CDCl₃) δ 157.87, 146.73, 146.67, 138.63, 136.89, 136.43, 134.71, 134.57, 134.48, 129.88, 129.46, 129.42, 128.66, 128.05, 127.96, 127.87, 127.81, 126.17, 113.13, 78.14, 78.07, 77.48, 77.43, 77.22, 76.97, 70.45, 68.03, 68.01, 63.50, 63.40, 55.22, 47.46, 47.17, 46.40, 43.69, 34.79, 31.34, 31.07, 27.19, 27.09, 26.04, 25.98, 17.60, 11.78, -3.17. ³¹P-NMR (500 MHz, CDCl₃): δ 154.27 (92.18%), 157.68 (3.56%), 146.35 (4.26%).

### Example 12. Example Preparation of WV-4107

[2166] Oligonucleotides were prepared using conditions for WV-3473 with all protecting groups and auxiliaries on and remained on solid support (if cleaved and deprotected, would provide WV-3473) using provided oligonucleotide technologies. In an example procedure, DPSE chemistry and GE Primer Support 5G (2.1 g), and the following cycles were used:

| | | reagents and | volume | | waiting | |
|---|---|---|---|---|---|---|
| step | operation | solvent | per cycle | | time | |
| 1 | detritylation | 3% DCA in toluene | ~150 | mL | ~6 | min |
| 2 | coupling | 0.175M monomer | 21 | mL | 8 | min |
| | | in MeCN or 20% | | | | |
| | | isobutyronitrile | | | | |
| | | in MeCN + 0.6M | | | | |
| | | CMIMT in MeCN | | | | |
| 3 | capping | 20% Ac₂O, 30% 2,6- | 23 | mL | 1.5 | min |
| | | lutidine in MeCN + | | | | |
| | | 20% MeIm in MeCN | | | | |

| | | | | |
|---|---|---|---|---|
| 4 | oxidation or | 1.1M TBHP in DCM- | 44 mL or | 2 min or |
| | sulfurization | decane or 0.1M POS | 39 mL | 6 min |
| | | in MeCN | | |

[2167] After the last cycle, a portion of the oligonucleotides can be cleaved and deprotected for QC or other purposes. In an example procedure the oligonucleotides on support were washed with 6 column volumes of 20% diethylamine in acetonitrile for 15 min followed by an acetonitrile wash. The support was dried and then incubated in 1 M triethylamine hydrofluoride in 3:1 dimethylformamide/water for 1-1.5 h at 50° C. The sample was filtered and washed with acetonitrile and dried. The support was then incubated overnight at 40° C. in 3:1 ammonium hydroxide/ethanol.

[2168] For preparation of WV-4107, after the last cycle the DMT protecting group was removed using 3% dichloroacetic acid in toluene. During the coupling step, MMT-C6-amino DPSE-L amidite (0.175 M in isobutyronitrile) and CMIMT activator (0.6 M in acetonitrile) were added with a contact time of 8 min. The percent volume of activator was 55%. Capping was performed with 20% 1-methylimidazole in acetonitrile and 20/30/50 acetic anhydride/2,6-lutidine/acetonitrile. Sulfurization was performed using 0.1 M PolyOrg Sulfa in acetonitrile.

[2169] The MMT protecting group was then removed while the oligonucleotide was on support with deblocking reagent (3% dichloroacetic acid in toluene) until the yellow color was no longer observed, providing WV-4191. Stearic acid was then coupled to the amine using described procedure above. The oligonucleotides on support were washed with 20% diethylamine in acetonitrile for 30 min at room temperature followed by an acetonitrile wash. The support was dried and then incubated in 1 M triethylamine hydrofluoride in 3:1 dimethylformamide/water for 1-1.5 h at 50° C. The sample was filtered and washed with acetonitrile and dried. The support was then incubated overnight at 40° C. in 3:1 ammonium hydroxide/ethanol. The crude product was further purified using RP-HPLC to provide WV-4107.

### Example 13. Example Preparation of Oligonucleotides with Mod021

[2170] Oligonucleotide was synthesized at a scale of 10 μmol using standard cyanoethyl phosphoramidite chemistry and was left on support with protecting groups using cycle conditions for WV-942 (if cleaved and deprotected, would provide WV-942). The DMT protecting group was removed using 3% trichloroacetic acid in dichloromethane. The lipid amidite was then added to the 5′ end of the oligonucleotide on the synthesizer. During the coupling step, equal volumes of lipid amidite (e.g., 0.1 M in isobutyronitrile) and 5-ethylthio tetrazole (e.g., 0.5 M in acetonitrile) were added with a contact time of, e.g., 5 min. The coupling step was optionally repeated a second time. Sulfurization was performed using 0.1 M DDTT in pyridine. The oligonucleotide was cleaved and deprotected using AMA condition (ammonium hydroxide/40% aqueous methylamine 1:1 v/v) to provide WV-2588.

### Example 14. Example Preparation of Oligonucleotides with Mod030, Mod031, Mod032 and Mod033

[2171] Oligonucleotides were synthesized using cyanoethyl phosphoramidite chemistry as for WV-2735 and were left on support with the protecting group on (if cleaved and deprotected, would provide WV-2735). The 5′-DMT protecting group was removed using 3% trichloroacetic acid in dichloromethane. The lipid amidites were then added to the 5′ end of the oligonucleotide on the synthesizer. During the coupling step, equal volumes of lipid amidite (0.1M in isobutyronitrile or dichloromethane) and 5-ethylthio tetrazole (0.5M in acetonitrile) were added with a contact time of 10 min. The coupling step was repeated again. Oxidation was performed using 0.02 M I₂ in THF/pyridine/water. The oligonucleotides were de-protected with 20% diethylamine in acetonitrile wash followed by an acetonitrile wash. The oligonucleotides were cleaved from the support and further de-protected in ammonium hydroxide at 50° C. overnight.

[2172] Product oligonucleotides were characterized in various chemical analyses, e.g., UV, HPLC-MS, etc., (for example MS data, see Table 6) and biological assays, e.g., those described herein. Following similar procedures and/or using widely known and practiced technologies in the art, other example provided oligonucleotides were or can be readily prepared and characterized in accordance with the present disclosure.

[2173] While several embodiments of the present disclosure have been described and illustrated herein, those of ordinary skill in the art will readily envision a variety of other means and/or structures for performing the functions and/or obtaining the results and/or one or more of the advantages described herein, and each of such variations and/or modifications is deemed to be within the scope of the present disclosure. More generally, those skilled in the art will readily appreciate that all parameters, dimensions, materials, and configurations described herein are meant to be examples and that the actual parameters, dimensions, materials, and/or configurations will depend upon the specific application or applications for which the teachings of the present disclosure is/are used. Those skilled in the art will recognize, or be able to ascertain using no more than routine experimentation, many equivalents to the specific embodiments of the disclosure described herein. It is, therefore, to be understood that the foregoing embodiments are presented by way of example only and that, within the scope of the appended claims and equivalents thereto, the disclosure may be practiced otherwise than as specifically described and claimed. The present disclosure is directed to each individual feature, system, article, material, kit, and/or method described herein. In addition, any combination of two or more such features, systems, articles, materials, kits, and/or methods, if such features, systems, articles, materials, kits, and/or methods are not mutually inconsistent, is included within the scope of the present disclosure.

1.-22. (canceled)

23. A composition comprising a plurality of compounds having the structure of: [chemical structure]
or a salt thereof,
wherein:
A^{c} is an oligonucleotide chain;
a is 1-1000;
b is 1-1000;
each L^{LD} is independently a covalent bond or an optionally substituted, C₁-C₈₀ saturated or partially unsaturated aliphatic group, wherein one or more methylene units are optionally and independently replaced by T^{LD} or an optionally substituted group selected from C₁-C₆ alkylene, C₁-C₆ alkenylene, —C≡C—, a C₁-C₆ heteroaliphatic moiety, —C(R′)₂—, —Cy-, —O—, —S—, —S—S—, —N(R′)—, —C(O)—, —C(S)—, —C(NR′)—, —C(O)N(R′)—, —N(R′)C(O)N(R′)—, —N(R′)C(O)—, —N(R′)C(O)O—, —OC(O)N(R′)—, —S(O)—, —S(O)₂—, —S(O)₂N(R′)—, —N(R′)S(O)₂—, —SC(O)—, —C(O)S—, —OC(O)—, and —C(O)O—;
each R^{LD} is independently an optionally substituted, C10-C₈₀ saturated or partially unsaturated aliphatic group, wherein one or more methylene units are optionally and independently replaced by an optionally substituted group selected from C₁-C₆ alkylene, C₁-C₆ alkenylene, —C≡C—, a C₁-C₆ heteroaliphatic moiety, —C(R′)₂—, —Cy-, —O—, —S—, —S—S—, —N(R′)—, —C(O)—, —C(S)—, —C(NR′)—, —C(O)N(R′)—, —N(R′)C(O)N(R′)—, —N(R′)C(O)—, —N(R′)C(O)O—, —OC(O)N(R′)—, —S(O)—, —S(O)₂—, —S(O)₂N(R′)—, —N(R′)S(O)₂—, —SC(O)—, —C(O)S—, —OC(O)—, and —C(O)O—;
T^{LD} has the structure of: [chemical structure]
W is O, S or Se;
each of X, Y and Z is independently —O—, —S—, —N(-L-R′)—, or L;
L is a covalent bond or an optionally substituted, linear or branched C₁-C₁₀ alkylene, wherein one or more methylene units of L are optionally and independently replaced by an optionally substituted group selected from C₁-C₆ alkylene, C₁-C₆ alkenylene, —C≡C—, a C₁-C₆ heteroaliphatic moiety, —C(R′)₂—, —Cy-, —O—, —S—, —S—S—, —N(R′)—, —C(O)—, —C(S)—, —C(NR′)—, —C(O)N(R′)—, —N(R′)C(O)N(R′)—, —N(R′)C(O)—, —N(R′)C(O)O—, —OC(O)N(R′)—, —S(O)—, —S(O)₂—, —S(O)₂N(R′)—, —N(R′)S(O)₂——SC(O)—, —C(O)S—, —OC(O)—, and —C(O)O—;
R¹ is halogen, R, or an optionally substituted C₁-C₅₀ aliphatic wherein one or more methylene units are optionally and independently replaced by an optionally substituted group selected from C₁-C₆ alkylene, C₁-C₆ alkenylene, CEC, a C₁-C₆ heteroaliphatic moiety, —C(R′)₂—, —Cy-, —O—, —S—, —S—S—, —N(R′)—, —C(O)—, —C(S)—, —C(NR′)—, —C(O)N(R′)—, —N(R′)C(O)N(R′)—, —N(R′)C(O)—, —N(R′)C(O)O—, —OC(O)N(R′)—, —S(O)—, —S(O)₂—, —S(O)₂N(R′)—, —N(R′)S(O)₂——SC(O)—, —C(O)S—, —OC(O)—, and —C(O)O—
each R′ is independently —R, —C(O)R, —CO₂R, or —SO₂R, or:
two R′ are taken together with their intervening atoms to form an optionally substituted aryl, carbocyclic, heterocyclic, or heteroaryl ring;
—Cy- is an optionally substituted bivalent ring selected from phenylene, carbocyclylene, arylene, heteroarylene, and heterocyclylene;
each R is independently hydrogen, or an optionally substituted group selected from C₁-C₆ aliphatic, carbocyclyl, aryl, heteroaryl, and heterocyclyl; and
A^{c} comprises one or more chiral internucleotidic linkages, and each chiral internucleotidic linkage of A^{c} is independently chirally controlled.

24. The composition of claim 23, wherein a is 1.

25. The composition of claim 23, wherein b is 1.

26. The composition of claim 23, wherein at least one L^{LD} is or comprises T^{LD}.

27. The composition of claim 23, wherein at least one L^{LD} is or comprises phosphate.

28. The composition of claim 23, wherein A^{c} comprises one or more phosphorothioate internucleotidic linkages, each of which is independently chirally controlled.

29. A method for modulating hTLR9 agonist activity, comprising administering to a subject an oligonucleotide composition, wherein the composition comprises a plurality of compounds having the structure of: [chemical structure]
or a salt thereof,
wherein:
A^{c} is an oligonucleotide chain;
a is 1-1000;
b is 1-1000;
each L^{LD} is independently a covalent bond or an optionally substituted, C1-C₈₀ saturated or partially unsaturated aliphatic group, wherein one or more methylene units are optionally and independently replaced by T^{LD} or an optionally substituted group selected from C₁-C₆ alkylene, C₁-C₆ alkenylene, —C≡C—, a C₁-C₆ heteroaliphatic moiety, —C(R′)₂—, —Cy-, —O—, —S—, —S—S—, —N(R′)—, —C(O)—, —C(S)—, —C(NR′)—, —C(O)N(R′)—, —N(R′)C(O)N(R′)—, —N(R′)C(O)—, —N(R′)C(O)O—, —OC(O)N(R′)—, —S(O)—, —S(O)₂—, —S(O)₂N(R′)—, —N(R′)S(O)₂—, —SC(O)—, —C(O)S—, —OC(O)—, and —C(O)O—;
each R^{LD} is independently an optionally substituted, C₁₀-C₈₀ saturated or partially unsaturated aliphatic group, wherein one or more methylene units are optionally and independently replaced by an optionally substituted group selected from C₁-C₆ alkylene, C₁-C₆ alkenylene, —C≡C—, a C₁-C₆ heteroaliphatic moiety, —C(R′)₂—, —Cy-, —O—, —S—, —S—S—, —N(R′)—, —C(O)—, —C(S)—, —C(NR′)—, —C(O)N(R′)—, —N(R′)C(O)N(R′)—, —N(R′)C(O)—, —N(R′)C(O)O—, —OC(O)N(R′)—, —S(O)—, —S(O)₂—, —S(O)₂N(R′)—, —N(R′)S(O)₂—, —SC(O)—, —C(O)S—, —OC(O)—, and —C(O)O—;
T^{LD} has the structure of: [chemical structure]
W is O, S or Se;
each of X, Y and Z is independently —O—, —S—, —N(-L-R′)—, or L;
L is a covalent bond or an optionally substituted, linear or branched C₁-C₁₀ alkylene, wherein one or more methylene units of L are optionally and independently replaced by an optionally substituted group selected from C₁-C₆ alkylene, C₁-C₆ alkenylene, —C≡C—, a C₁-C₆ heteroaliphatic moiety, —C(R′)₂—, —Cy-, —O—, —S—, —S—S—, —N(R′)—, —C(O)—, —C(S)—, —C(NR′)—, —C(O)N(R′)—, —N(R′)C(O)N(R′)—, —N(R′)C(O)—, —N(R′)C(O)O—, —OC(O)N(R′)—, —S(O)—, —S(O)₂—, —S(O)₂N(R′)—, —N(R′)S(O)₂——SC(O)—, —C(O)S—, —OC(O)—, and —C(O)O—;
R¹ is halogen, R, or an optionally substituted C₁-C₅₀ aliphatic wherein one or more methylene units are optionally and independently replaced by an optionally substituted group selected from C₁-C₆ alkylene, C₁-C₆ alkenylene, CEC, a C₁-C₆ heteroaliphatic moiety, —C(R′)₂—, —Cy-, —O—, —S—, —S—S—, —N(R′)—, —C(O)—, —C(S)—, —C(NR′)—, —C(O)N(R′)—, —N(R′)C(O)N(R′)—, —N(R′)C(O)—, —N(R′)C(O)O—, —OC(O)N(R′)—, —S(O)—, —S(O)₂—, —S(O)₂N(R′)—, —N(R′)S(O)₂——SC(O)—, —C(O)S—, —OC(O)—, and —C(O)O—
each R′ is independently —R, —C(O)R, —CO₂R, or —SO₂R, or:
two R′ are taken together with their intervening atoms to form an optionally substituted aryl, carbocyclic, heterocyclic, or heteroaryl ring;
—Cy- is an optionally substituted bivalent ring selected from phenylene, carbocyclylene, arylene, heteroarylene, and heterocyclylene;
each R is independently hydrogen, or an optionally substituted group selected from C₁-C₆ aliphatic, carbocyclyl, aryl, heteroaryl, and heterocyclyl; and
A^{c} comprises one or more chiral internucleotidic linkages, and each chiral internucleotidic linkage of A^{c} is independently chirally controlled.

30. The method of claim 29, wherein a is 1.

31. The method of claim 29, wherein b is 1.

32. The method of claim 29, wherein at least one L^{LD} is or comprises T^{LD}.

33. The method of claim 29, wherein at least one L^{LD} is or comprises phosphate.

34. The method of claim 29, wherein A^{c} comprises one or more phosphorothioate internucleotidic linkages, each of which is independently chirally controlled.

35. A method for preparing a composition, comprising coupling a phosphoramidite, wherein the composition comprises a plurality of compounds having the structure of: [chemical structure]
or a salt thereof,
wherein:
A^{c} is an oligonucleotide chain;
a is 1-1000;
b is 1-1000;
each L^{LD} is independently a covalent bond or an optionally substituted, C1-C₈₀ saturated or partially unsaturated aliphatic group, wherein one or more methylene units are optionally and independently replaced by T^{LD} or an optionally substituted group selected from C₁-C₆ alkylene, C₁-C₆ alkenylene, —C≡C—, a C₁-C₆ heteroaliphatic moiety, —C(R′)₂—, —Cy-, —O—, —S—, —S—S—, —N(R′)—, —C(O)—, —C(S)—, —C(NR′)—, —C(O)N(R′)—, —N(R′)C(O)N(R′)—, —N(R′)C(O)—, —N(R′)C(O)O—, —OC(O)N(R′)—, —S(O)—, —S(O)₂—, —S(O)₂N(R′)—, —N(R′)S(O)₂—, —SC(O)—, —C(O)S—, —OC(O)—, and —C(O)O—;
each R^{LD} is independently an optionally substituted, C₁₀-C₈₀ saturated or partially unsaturated aliphatic group, wherein one or more methylene units are optionally and independently replaced by an optionally substituted group selected from C₁-C₆ alkylene, C₁-C₆ alkenylene, —C≡C—, a C₁-C₆ heteroaliphatic moiety, —C(R′)₂—, —Cy-, —O—, —S—, —S—S—, —N(R′)—, —C(O)—, —C(S)—, —C(NR′)—, —C(O)N(R′)—, —N(R′)C(O)N(R′)—, —N(R′)C(O)—, —N(R′)C(O)O—, —OC(O)N(R′)—, —S(O)—, —S(O)₂—, —S(O)₂N(R′)—, —N(R′)S(O)₂—, —SC(O)—, —C(O)S—, —OC(O)—, and —C(O)O—;
T^{LD} has the structure of: [chemical structure]
W is O, S or Se;
each of X, Y and Z is independently —O—, —S—, —N(-L-R′)—, or L;
L is a covalent bond or an optionally substituted, linear or branched C₁-C₁₀ alkylene, wherein one or more methylene units of L are optionally and independently replaced by an optionally substituted group selected from C₁-C₆ alkylene, C₁-C₆ alkenylene, —C≡C—, a C₁-C₆ heteroaliphatic moiety, —C(R′)₂—, —Cy-, —O—, —S—, —S—S—, —N(R′)—, —C(O)—, —C(S)—, —C(NR′)—, —C(O)N(R′)—, —N(R′)C(O)N(R′)—, —N(R′)C(O)—, —N(R′)C(O)O—, —OC(O)N(R′)—, —S(O)—, —S(O)₂—, —S(O)₂N(R′)—, —N(R′)S(O)₂——SC(O)—, —C(O)S—, —OC(O)—, and —C(O)O—;
R¹ is halogen, R, or an optionally substituted C₁-C₅₀ aliphatic wherein one or more methylene units are optionally and independently replaced by an optionally substituted group selected from C₁-C₆ alkylene, C₁-C₆ alkenylene, CEC, a C₁-C₆ heteroaliphatic moiety, —C(R′)₂—, —Cy-, —O—, —S—, —S—S—, —N(R′)—, —C(O)—, —C(S)—, —C(NR′)—, —C(O)N(R′)—, —N(R′)C(O)N(R′)—, —N(R′)C(O)—, —N(R′)C(O)O—, —OC(O)N(R′)—, —S(O)—, —S(O)₂—, —S(O)₂N(R′)—, —N(R′)S(O)₂——SC(O)—, —C(O)S—, —OC(O)—, and —C(O)O—
each R′ is independently —R, —C(O)R, —CO₂R, or —SO₂R, or:
two R′ are taken together with their intervening atoms to form an optionally substituted aryl, carbocyclic, heterocyclic, or heteroaryl ring;
—Cy- is an optionally substituted bivalent ring selected from phenylene, carbocyclylene, arylene, heteroarylene, and heterocyclylene;
each R is independently hydrogen, or an optionally substituted group selected from C₁-C₆ aliphatic, carbocyclyl, aryl, heteroaryl, and heterocyclyl; and
A^{c} comprises one or more chiral internucleotidic linkages, and each chiral internucleotidic linkage of A^{c} is independently chirally controlled.

36. The method of claim 35, wherein a is 1.

37. The method of claim 35, wherein b is 1.

38. The method of claim 35, wherein at least one L^{LD} is or comprises T^{LD}.

39. The method of claim 35, wherein at least one L^{LD} is or comprises phosphate.

40. The method of claim 35, wherein A^{c} comprises one or more phosphorothioate internucleotidic linkages, each of which is independently chirally controlled.

The application's sequence listing, which the Patent Office published only in electronic form, follows.

SEQUENCE LISTING (1834 sequences)

SEQ ID NO: 1 - DNA, 24 bp, synthetic construct
  misc_feature 1..24: note = Description of Artificial Sequence: Synthetic oligonucleotide
  source 1..24: mol_type = other DNA
tcgtcgttttgtcgttttgtcgtt

SEQ ID NO: 2 - DNA, 24 bp, synthetic construct
  misc_feature 1..24: note = Description of Artificial Sequence: Synthetic oligonucleotide
  source 1..24: mol_type = other DNA
tcgtcgttttgtcgttttgtcgtt

SEQ ID NO: 3 - DNA, 24 bp, synthetic construct
  misc_feature 1..24: note = Description of Artificial Sequence: Synthetic oligonucleotide
  source 1..24: mol_type = other DNA
tcgtcgttttgtcgttttgtcgtt

SEQ ID NO: 4 - DNA, 20 bp, synthetic construct
  misc_feature 1..20: note = Description of Artificial Sequence: Synthetic oligonucleotide
  source 1..20: mol_type = other DNA
gcctcagtctgcttcgcacc

SEQ ID NO: 5 - DNA, 20 bp, synthetic construct
  misc_feature 1..20: note = Description of Artificial Sequence: Synthetic oligonucleotide
  source 1..20: mol_type = other DNA
gcctcagtctgcttcgcacc

SEQ ID NO: 6 - DNA, 13 bp, synthetic construct
  misc_feature 1..13: note = Description of Artificial Sequence: Synthetic oligonucleotide
  source 1..13: mol_type = other DNA
aatcgatcgatcg

SEQ ID NO: 7 - DNA, 20 bp, synthetic construct
  misc_feature 1..20: note = Description of Artificial Sequence: Synthetic oligonucleotide
  source 1..20: mol_type = other DNA
gcctcagtctgcttcgcacc

SEQ ID NO: 8 - DNA, 20 bp, synthetic construct
  misc_feature 1..20: note = Description of Artificial Sequence: Synthetic oligonucleotide
  source 1..20: mol_type = other DNA
gcctcagtctgcttcgcacc

SEQ ID NO: 9 - protein, 13 aa, synthetic construct
  REGION 1..13: note = Description of Artificial Sequence: Synthetic peptide
GRKKRRQRRRPPQ

SEQ ID NO: 10 - RNA, 20 nt, synthetic construct
  misc_feature 1..20: note = Description of Artificial Sequence: Synthetic oligonucleotide
  source 1..20: mol_type = other RNA
tcaaggaagatggcatttct

SEQ ID NO: 11 - RNA, 20 nt, synthetic construct
  misc_feature 1..20: note = Description of Artificial Sequence: Synthetic oligonucleotide
  source 1..20: mol_type = other RNA
tcaaggaagatggcatttct

SEQ ID NO: 12 - RNA, 20 nt, synthetic construct
  misc_feature 1..20: note = Description of Artificial Sequence: Synthetic oligonucleotide
  source 1..20: mol_type = other RNA
ggccaaacctcggcttacct

SEQ ID NO: 13 - RNA, 30 nt, synthetic construct
  misc_feature 1..30: note = Description of Artificial Sequence: Synthetic oligonucleotide
  source 1..30: mol_type = other RNA
ctccaacatcaaggaagatggcatttctag

SEQ ID NO: 14 - RNA, 25 nt, synthetic construct
  misc_feature 1..25: note = Description of Artificial Sequence: Synthetic oligonucleotide
  source 1..25: mol_type = other RNA
accagagtaacagtctgagtaggag

SEQ ID NO: 15 - RNA, 25 nt, synthetic construct
  misc_feature 1..25: note = Description of Artificial Sequence: Synthetic oligonucleotide
  source 1..25: mol_type = other RNA
caccagagtaacagtctgagtagga

SEQ ID NO: 16 - RNA, 25 nt, synthetic construct
  misc_feature 1..25: note = Description of Artificial Sequence: Synthetic oligonucleotide
  source 1..25: mol_type = other RNA
tcaccagagtaacagtctgagtagg

SEQ ID NO: 17 - RNA, 25 nt, synthetic construct
  misc_feature 1..25: note = Description of Artificial Sequence: Synthetic oligonucleotide
  source 1..25: mol_type = other RNA
gtcaccagagtaacagtctgagtag

SEQ ID NO: 18 - RNA, 25 nt, synthetic construct
  misc_feature 1..25: note = Description of Artificial Sequence: Synthetic oligonucleotide
  source 1..25: mol_type = other RNA
gttgtgtcaccagagtaacagtctg

SEQ ID NO: 19 - RNA, 25 nt, synthetic construct
  misc_feature 1..25: note = Description of Artificial Sequence: Synthetic oligonucleotide
  source 1..25: mol_type = other RNA
ggttgtgtcaccagagtaacagtct

SEQ ID NO: 20 - RNA, 25 nt, synthetic construct
  misc_feature 1..25: note = Description of Artificial Sequence: Synthetic oligonucleotide
  source 1..25: mol_type = other RNA
aggttgtgtcaccagagtaacagtc

SEQ ID NO: 21 - RNA, 25 nt, synthetic construct
  misc_feature 1..25: note = Description of Artificial Sequence: Synthetic oligonucleotide
  source 1..25: mol_type = other RNA
caggttgtgtcaccagagtaacagt

SEQ ID NO: 22 - RNA, 25 nt, synthetic construct
  misc_feature 1..25: note = Description of Artificial Sequence: Synthetic oligonucleotide
  source 1..25: mol_type = other RNA
acaggttgtgtcaccagagtaacag

SEQ ID NO: 23 - RNA, 25 nt, synthetic construct
  misc_feature 1..25: note = Description of Artificial Sequence: Synthetic oligonucleotide
  source 1..25: mol_type = other RNA
ccacaggttgtgtcaccagagtaac

SEQ ID NO: 24 - RNA, 25 nt, synthetic construct
  misc_feature 1..25: note = Description of Artificial Sequence: Synthetic oligonucleotide
  source 1..25: mol_type = other RNA
accacaggttgtgtcaccagagtaa

SEQ ID NO: 25 - RNA, 25 nt, synthetic construct
  misc_feature 1..25: note = Description of Artificial Sequence: Synthetic oligonucleotide
  source 1..25: mol_type = other RNA
aaccacaggttgtgtcaccagagta

SEQ ID NO: 26 - RNA, 25 nt, synthetic construct
  misc_feature 1..25: note = Description of Artificial Sequence: Synthetic oligonucleotide
  source 1..25: mol_type = other RNA
taaccacaggttgtgtcaccagagt

SEQ ID NO: 27 - RNA, 25 nt, synthetic construct
  misc_feature 1..25: note = Description of Artificial Sequence: Synthetic oligonucleotide
  source 1..25: mol_type = other RNA
gtaaccacaggttgtgtcaccagag

SEQ ID NO: 28 - RNA, 25 nt, synthetic construct
  misc_feature 1..25: note = Description of Artificial Sequence: Synthetic oligonucleotide
  source 1..25: mol_type = other RNA
agtaaccacaggttgtgtcaccaga

SEQ ID NO: 29 - RNA, 25 nt, synthetic construct
  misc_feature 1..25: note = Description of Artificial Sequence: Synthetic oligonucleotide
  source 1..25: mol_type = other RNA
tagtaaccacaggttgtgtcaccag

SEQ ID NO: 30 - RNA, 25 nt, synthetic construct
  misc_feature 1..25: note = Description of Artificial Sequence: Synthetic oligonucleotide
  source 1..25: mol_type = other RNA
ttagtaaccacaggttgtgtcacca

SEQ ID NO: 31 - RNA, 25 nt, synthetic construct
  misc_feature 1..25: note = Description of Artificial Sequence: Synthetic oligonucleotide
  source 1..25: mol_type = other RNA
cttagtaaccacaggttgtgtcacc

SEQ ID NO: 32 - RNA, 25 nt, synthetic construct
  misc_feature 1..25: note = Description of Artificial Sequence: Synthetic oligonucleotide
  source 1..25: mol_type = other RNA
ccttagtaaccacaggttgtgtcac

SEQ ID NO: 33 - RNA, 25 nt, synthetic construct
  misc_feature 1..25: note = Description of Artificial Sequence: Synthetic oligonucleotide
  source 1..25: mol_type = other RNA
tccttagtaaccacaggttgtgtca

SEQ ID NO: 34 - RNA, 25 nt, synthetic construct
  misc_feature 1..25: note = Description of Artificial Sequence: Synthetic oligonucleotide
  source 1..25: mol_type = other RNA
gtttccttagtaaccacaggttgtg

SEQ ID NO: 35 - RNA, 25 nt, synthetic construct
  misc_feature 1..25: note = Description of Artificial Sequence: Synthetic oligonucleotide
  source 1..25: mol_type = other RNA
agtttccttagtaaccacaggttgt

SEQ ID NO: 36 - RNA, 25 nt, synthetic construct
  misc_feature 1..25: note = Description of Artificial Sequence: Synthetic oligonucleotide
  source 1..25: mol_type = other RNA
cagtttccttagtaaccacaggttg

SEQ ID NO: 37 - RNA, 25 nt, synthetic construct
  misc_feature 1..25: note = Description of Artificial Sequence: Synthetic oligonucleotide
  source 1..25: mol_type = other RNA
gcagtttccttagtaaccacaggtt

SEQ ID NO: 38 - RNA, 25 nt, synthetic construct
  misc_feature 1..25: note = Description of Artificial Sequence: Synthetic oligonucleotide
  source 1..25: mol_type = other RNA
ggcagtttccttagtaaccacaggt

SEQ ID NO: 39 - RNA, 25 nt, synthetic construct
  misc_feature 1..25: note = Description of Artificial Sequence: Synthetic oligonucleotide
  source 1..25: mol_type = other RNA
tggcagtttccttagtaaccacagg

SEQ ID NO: 40 - RNA, 25 nt, synthetic construct
  misc_feature 1..25: note = Description of Artificial Sequence: Synthetic oligonucleotide
  source 1..25: mol_type = other RNA
atggcagtttccttagtaaccacag

SEQ ID NO: 41 - RNA, 25 nt, synthetic construct
  misc_feature 1..25: note = Description of Artificial Sequence: Synthetic oligonucleotide
  source 1..25: mol_type = other RNA
agatggcagtttccttagtaaccac

SEQ ID NO: 42 - RNA, 25 nt, synthetic construct
  misc_feature 1..25: note = Description of Artificial Sequence: Synthetic oligonucleotide
  source 1..25: mol_type = other RNA
gagatggcagtttccttagtaacca

SEQ ID NO: 43 - RNA, 25 nt, synthetic construct
  misc_feature 1..25: note = Description of Artificial Sequence: Synthetic oligonucleotide
  source 1..25: mol_type = other RNA
ggagatggcagtttccttagtaacc

SEQ ID NO: 44 - RNA, 25 nt, synthetic construct
  misc_feature 1..25: note = Description of Artificial Sequence: Synthetic oligonucleotide
  source 1..25: mol_type = other RNA
tggagatggcagtttccttagtaac

SEQ ID NO: 45 - RNA, 25 nt, synthetic construct
  misc_feature 1..25: note = Description of Artificial Sequence: Synthetic oligonucleotide
  source 1..25: mol_type = other RNA
ttggagatggcagtttccttagtaa

SEQ ID NO: 46 - RNA, 25 nt, synthetic construct
  misc_feature 1..25: note = Description of Artificial Sequence: Synthetic oligonucleotide
  source 1..25: mol_type = other RNA
tttggagatggcagtttccttagta

SEQ ID NO: 47 - RNA, 25 nt, synthetic construct
  misc_feature 1..25: note = Description of Artificial Sequence: Synthetic oligonucleotide
  source 1..25: mol_type = other RNA
agtttggagatggcagtttccttag

SEQ ID NO: 48 - RNA, 25 nt, synthetic construct
  misc_feature 1..25: note = Description of Artificial Sequence: Synthetic oligonucleotide
  source 1..25: mol_type = other RNA
tagtttggagatggcagtttcctta

SEQ ID NO: 49 - RNA, 25 nt, synthetic construct
  misc_feature 1..25: note = Description of Artificial Sequence: Synthetic oligonucleotide
  source 1..25: mol_type = other RNA
ctagtttggagatggcagtttcctt

SEQ ID NO: 50 - RNA, 25 nt, synthetic construct
  misc_feature 1..25: note = Description of Artificial Sequence: Synthetic oligonucleotide
  source 1..25: mol_type = other RNA
tctagtttggagatggcagtttcct

SEQ ID NO: 51 - RNA, 25 nt, synthetic construct
  misc_feature 1..25: note = Description of Artificial Sequence: Synthetic oligonucleotide
  source 1..25: mol_type = other RNA
ttctagtttggagatggcagtttcc

SEQ ID NO: 52 - RNA, 25 nt, synthetic construct
  misc_feature 1..25: note = Description of Artificial Sequence: Synthetic oligonucleotide
  source 1..25: mol_type = other RNA
catttctagtttggagatggcagtt

SEQ ID NO: 53 - RNA, 25 nt, synthetic construct
  misc_feature 1..25: note = Description of Artificial Sequence: Synthetic oligonucleotide
  source 1..25: mol_type = other RNA
gcatttctagtttggagatggcagt

SEQ ID NO: 54 - RNA, 25 nt, synthetic construct
  misc_feature 1..25: note = Description of Artificial Sequence: Synthetic oligonucleotide
  source 1..25: mol_type = other RNA
atggcatttctagtttggagatggc

SEQ ID NO: 55 - RNA, 25 nt, synthetic construct
  misc_feature 1..25: note = Description of Artificial Sequence: Synthetic oligonucleotide
  source 1..25: mol_type = other RNA
gaagatggcatttctagtttggaga

SEQ ID NO: 56 - RNA, 25 nt, synthetic construct
  misc_feature 1..25: note = Description of Artificial Sequence: Synthetic oligonucleotide
  source 1..25: mol_type = other RNA
aggaagatggcatttctagtttgga

SEQ ID NO: 57 - RNA, 25 nt, synthetic construct
  misc_feature 1..25: note = Description of Artificial Sequence: Synthetic oligonucleotide
  source 1..25: mol_type = other RNA
aaggaagatggcatttctagtttgg

SEQ ID NO: 58 - RNA, 25 nt, synthetic construct
  misc_feature 1..25: note = Description of Artificial Sequence: Synthetic oligonucleotide
  source 1..25: mol_type = other RNA
caaggaagatggcatttctagtttg

SEQ ID NO: 59 - RNA, 25 nt, synthetic construct
  misc_feature 1..25: note = Description of Artificial Sequence: Synthetic oligonucleotide
  source 1..25: mol_type = other RNA
catcaaggaagatggcatttctagt

SEQ ID NO: 60 - RNA, 25 nt, synthetic construct
  misc_feature 1..25: note = Description of Artificial Sequence: Synthetic oligonucleotide
  source 1..25: mol_type = other RNA
acatcaaggaagatggcatttctag

SEQ ID NO: 61 - RNA, 25 nt, synthetic construct
  misc_feature 1..25: note = Description of Artificial Sequence: Synthetic oligonucleotide
  source 1..25: mol_type = other RNA
aacatcaaggaagatggcatttcta

SEQ ID NO: 62 - RNA, 25 nt, synthetic construct
  misc_feature 1..25: note = Description of Artificial Sequence: Synthetic oligonucleotide
  source 1..25: mol_type = other RNA
caacatcaaggaagatggcatttct

SEQ ID NO: 63 - RNA, 25 nt, synthetic construct
  misc_feature 1..25: note = Description of Artificial Sequence: Synthetic oligonucleotide
  source 1..25: mol_type = other RNA
ctccaacatcaaggaagatggcatt

SEQ ID NO: 64 - RNA, 25 nt, synthetic construct
  misc_feature 1..25: note = Description of Artificial Sequence: Synthetic oligonucleotide
  source 1..25: mol_type = other RNA
acctccaacatcaaggaagatggca

SEQ ID NO: 65 - RNA, 25 nt, synthetic construct
  misc_feature 1..25: note = Description of Artificial Sequence: Synthetic oligonucleotide
  source 1..25: mol_type = other RNA
gtacctccaacatcaaggaagatgg

SEQ ID NO: 66 - RNA, 25 nt, synthetic construct
  misc_feature 1..25: note = Description of Artificial Sequence: Synthetic oligonucleotide
  source 1..25: mol_type = other RNA
aggtacctccaacatcaaggaagat

SEQ ID NO: 67 - RNA, 25 nt, synthetic construct
  misc_feature 1..25: note = Description of Artificial Sequence: Synthetic oligonucleotide
  source 1..25: mol_type = other RNA
agagcaggtacctccaacatcaagg

SEQ ID NO: 68 - RNA, 25 nt, synthetic construct
  misc_feature 1..25: note = Description of Artificial Sequence: Synthetic oligonucleotide
  source 1..25: mol_type = other RNA
cagagcaggtacctccaacatcaag

SEQ ID NO: 69 - RNA, 25 nt, synthetic construct
  misc_feature 1..25: note = Description of Artificial Sequence: Synthetic oligonucleotide
  source 1..25: mol_type = other RNA
ctgccagagcaggtacctccaacat

SEQ ID NO: 70 - RNA, 25 nt, synthetic construct
  misc_feature 1..25: note = Description of Artificial Sequence: Synthetic oligonucleotide
  source 1..25: mol_type = other RNA
tctgccagagcaggtacctccaaca

SEQ ID NO: 71 - RNA, 25 nt, synthetic construct
  misc_feature 1..25: note = Description of Artificial Sequence: Synthetic oligonucleotide
  source 1..25: mol_type = other RNA
atctgccagagcaggtacctccaac

SEQ ID NO: 72 - RNA, 25 nt, synthetic construct
  misc_feature 1..25: note = Description of Artificial Sequence: Synthetic oligonucleotide
  source 1..25: mol_type = other RNA
aatctgccagagcaggtacctccaa

SEQ ID NO: 73 - RNA, 25 nt, synthetic construct
  misc_feature 1..25: note = Description of Artificial Sequence: Synthetic oligonucleotide
  source 1..25: mol_type = other RNA
aaatctgccagagcaggtacctcca

SEQ ID NO: 74 - RNA, 25 nt, synthetic construct
  misc_feature 1..25: note = Description of Artificial Sequence: Synthetic oligonucleotide
  source 1..25: mol_type = other RNA
gaaatctgccagagcaggtacctcc

SEQ ID NO: 75 - RNA, 25 nt, synthetic construct
  misc_feature 1..25: note = Description of Artificial Sequence: Synthetic oligonucleotide
  source 1..25: mol_type = other RNA
tgaaatctgccagagcaggtacctc

SEQ ID NO: 76 - RNA, 25 nt, synthetic construct
  misc_feature 1..25: note = Description of Artificial Sequence: Synthetic oligonucleotide
  source 1..25: mol_type = other RNA
ttgaaatctgccagagcaggtacct

SEQ ID NO: 77 - RNA, 25 nt, synthetic construct
  misc_feature 1..25: note = Description of Artificial Sequence: Synthetic oligonucleotide
  source 1..25: mol_type = other RNA
cccggttgaaatctgccagagcagg

SEQ ID NO: 78 - RNA, 25 nt, synthetic construct
  misc_feature 1..25: note = Description of Artificial Sequence: Synthetic oligonucleotide
  source 1..25: mol_type = other RNA
ccaagcccggttgaaatctgccaga

SEQ ID NO: 79 - RNA, 25 nt, synthetic construct
  misc_feature 1..25: note = Description of Artificial Sequence: Synthetic oligonucleotide
  source 1..25: mol_type = other RNA
tccaagcccggttgaaatctgccag

SEQ ID NO: 80 - RNA, 25 nt, synthetic construct
  misc_feature 1..25: note = Description of Artificial Sequence: Synthetic oligonucleotide
  source 1..25: mol_type = other RNA
gtccaagcccggttgaaatctgcca

SEQ ID NO: 81 - RNA, 25 nt, synthetic construct
  misc_feature 1..25: note = Description of Artificial Sequence: Synthetic oligonucleotide
  source 1..25: mol_type = other RNA
tctgtccaagcccggttgaaatctg

SEQ ID NO: 82 - RNA, 25 nt, synthetic construct
  misc_feature 1..25: note = Description of Artificial Sequence: Synthetic oligonucleotide
  source 1..25: mol_type = other RNA
ttctgtccaagcccggttgaaatct

SEQ ID NO: 83 - RNA, 25 nt, synthetic construct
  misc_feature 1..25: note = Description of Artificial Sequence: Synthetic oligonucleotide
  source 1..25: mol_type = other RNA
gttctgtccaagcccggttgaaatc

SEQ ID NO: 84 - RNA, 25 nt, synthetic construct
  misc_feature 1..25: note = Description of Artificial Sequence: Synthetic oligonucleotide
  source 1..25: mol_type = other RNA
agttctgtccaagcccggttgaaat

SEQ ID NO: 85 - RNA, 25 nt, synthetic construct
  misc_feature 1..25: note = Description of Artificial Sequence: Synthetic oligonucleotide
  source 1..25: mol_type = other RNA
aagttctgtccaagcccggttgaaa

SEQ ID NO: 86 - RNA, 25 nt, synthetic construct
  misc_feature 1..25: note = Description of Artificial Sequence: Synthetic oligonucleotide
  source 1..25: mol_type = other RNA
taagttctgtccaagcccggttgaa

SEQ ID NO: 87 - RNA, 25 nt, synthetic construct
  misc_feature 1..25: note = Description of Artificial Sequence: Synthetic oligonucleotide
  source 1..25: mol_type = other RNA
gtaagttctgtccaagcccggttga

SEQ ID NO: 88 - RNA, 25 nt, synthetic construct
  misc_feature 1..25: note = Description of Artificial Sequence: Synthetic oligonucleotide
  source 1..25: mol_type = other RNA
ggtaagttctgtccaagcccggttg

SEQ ID NO: 89 - RNA, 25 nt, synthetic construct
  misc_feature 1..25: note = Description of Artificial Sequence: Synthetic oligonucleotide
  source 1..25: mol_type = other RNA
cggtaagttctgtccaagcccggtt

SEQ ID NO: 90 - RNA, 25 nt, synthetic construct
  misc_feature 1..25: note = Description of Artificial Sequence: Synthetic oligonucleotide
  source 1..25: mol_type = other RNA
tcggtaagttctgtccaagcccggt

SEQ ID NO: 91 - RNA, 25 nt, synthetic construct
  misc_feature 1..25: note = Description of Artificial Sequence: Synthetic oligonucleotide
  source 1..25: mol_type = other RNA
gtcggtaagttctgtccaagcccgg

SEQ ID NO: 92 - RNA, 25 nt, synthetic construct
  misc_feature 1..25: note = Description of Artificial Sequence: Synthetic oligonucleotide
  source 1..25: mol_type = other RNA
agtcggtaagttctgtccaagcccg

SEQ ID NO: 93 - RNA, 25 nt, synthetic construct
  misc_feature 1..25: note = Description of Artificial Sequence: Synthetic oligonucleotide
  source 1..25: mol_type = other RNA
cagtcggtaagttctgtccaagccc

SEQ ID NO: 94 - RNA, 25 nt, synthetic construct
  misc_feature 1..25: note = Description of Artificial Sequence: Synthetic oligonucleotide
  source 1..25: mol_type = other RNA
aaagccagtcggtaagttctgtcca

SEQ ID NO: 95 - RNA, 25 nt, synthetic construct
  misc_feature 1..25: note = Description of Artificial Sequence: Synthetic oligonucleotide
  source 1..25: mol_type = other RNA
gaaagccagtcggtaagttctgtcc

SEQ ID NO: 96 - RNA, 25 nt, synthetic construct
  misc_feature 1..25: note = Description of Artificial Sequence: Synthetic oligonucleotide
  source 1..25: mol_type = other RNA
gtcacccaccatcaccctctgtgat

SEQ ID NO: 97 - RNA, 25 nt, synthetic construct
  misc_feature 1..25: note = Description of Artificial Sequence: Synthetic oligonucleotide
  source 1..25: mol_type = other RNA
ggtcacccaccatcaccctctgtga

SEQ ID NO: 98 - RNA, 25 nt, synthetic construct
  misc_feature 1..25: note = Description of Artificial Sequence: Synthetic oligonucleotide
  source 1..25: mol_type = other RNA
aaggtcacccaccatcaccctctgt

SEQ ID NO: 99 - RNA, 25 nt, synthetic construct
  misc_feature 1..25: note = Description of Artificial Sequence: Synthetic oligonucleotide
  source 1..25: mol_type = other RNA
caaggtcacccaccatcaccctctg

SEQ ID NO: 100 - RNA, 25 nt, synthetic construct
  misc_feature 1..25: note = Description of Artificial Sequence: Synthetic oligonucleotide
  source 1..25: mol_type = other RNA
tcaaggtcacccaccatcaccctct

SEQ ID NO: 101 - RNA, 25 nt, synthetic construct
  misc_feature 1..25: note = Description of Artificial Sequence: Synthetic oligonucleotide
  source 1..25: mol_type = other RNA
ctcaaggtcacccaccatcaccctc

SEQ ID NO: 102 - RNA, 25 nt, synthetic construct
  misc_feature 1..25: note = Description of Artificial Sequence: Synthetic oligonucleotide
  source 1..25: mol_type = other RNA
cttgatcaagcagagaaagccagtc

SEQ ID NO: 103 - RNA, 25 nt, synthetic construct
  misc_feature 1..25: note = Description of Artificial Sequence: Synthetic oligonucleotide
  source 1..25: mol_type = other RNA
ataacttgatcaagcagagaaagcc

SEQ ID NO: 104 - RNA, 20 nt, synthetic construct
  misc_feature 1..20: note = Description of Artificial Sequence: Synthetic oligonucleotide
  source 1..20: mol_type = other RNA
agtaacagtctgagtaggag

SEQ ID NO: 105 - RNA, 20 nt, synthetic construct
  misc_feature 1..20: note = Description of Artificial Sequence: Synthetic oligonucleotide
  source 1..20: mol_type = other RNA
gagtaacagtctgagtagga

SEQ ID NO: 106 - RNA, 20 nt, synthetic construct
  misc_feature 1..20: note = Description of Artificial Sequence: Synthetic oligonucleotide
  source 1..20: mol_type = other RNA
agagtaacagtctgagtagg

SEQ ID NO: 107 - RNA, 20 nt, synthetic construct
  misc_feature 1..20: note = Description of Artificial Sequence: Synthetic oligonucleotide
  source 1..20: mol_type = other RNA
cagagtaacagtctgagtag

SEQ ID NO: 108 - RNA, 20 nt, synthetic construct
  misc_feature 1..20: note = Description of Artificial Sequence: Synthetic oligonucleotide
  source 1..20: mol_type = other RNA
gtcaccagagtaacagtctg

SEQ ID NO: 109 - RNA, 20 nt, synthetic construct
  misc_feature 1..20: note = Description of Artificial Sequence: Synthetic oligonucleotide
  source 1..20: mol_type = other RNA
tgtcaccagagtaacagtct

SEQ ID NO: 110 - RNA, 20 nt, synthetic construct
  misc_feature 1..20: note = Description of Artificial Sequence: Synthetic oligonucleotide
  source 1..20: mol_type = other RNA
gtgtcaccagagtaacagtc

SEQ ID NO: 111 - RNA, 20 nt, synthetic construct
  misc_feature 1..20: note = Description of Artificial Sequence: Synthetic oligonucleotide
  source 1..20: mol_type = other RNA
tgtgtcaccagagtaacagt

SEQ ID NO: 112 - RNA, 20 nt, synthetic construct
  misc_feature 1..20: note = Description of Artificial Sequence: Synthetic oligonucleotide
  source 1..20: mol_type = other RNA
ttgtgtcaccagagtaacag

SEQ ID NO: 113 - RNA, 20 nt, synthetic construct
  misc_feature 1..20: note = Description of Artificial Sequence: Synthetic oligonucleotide
  source 1..20: mol_type = other RNA
ggttgtgtcaccagagtaac

SEQ ID NO: 114 - RNA, 20 nt, synthetic construct
  misc_feature 1..20: note = Description of Artificial Sequence: Synthetic oligonucleotide
  source 1..20: mol_type = other RNA
aggttgtgtcaccagagtaa

SEQ ID NO: 115 - RNA, 20 nt, synthetic construct
  misc_feature 1..20: note = Description of Artificial Sequence: Synthetic oligonucleotide
  source 1..20: mol_type = other RNA
caggttgtgtcaccagagta

SEQ ID NO: 116 - RNA, 20 nt, synthetic construct
  misc_feature 1..20: note = Description of Artificial Sequence: Synthetic oligonucleotide
  source 1..20: mol_type = other RNA
acaggttgtgtcaccagagt

SEQ ID NO: 117 - RNA, 20 nt, synthetic construct
  misc_feature 1..20: note = Description of Artificial Sequence: Synthetic oligonucleotide
  source 1..20: mol_type = other RNA
cacaggttgtgtcaccagag

SEQ ID NO: 118 - RNA, 20 nt, synthetic construct
  misc_feature 1..20: note = Description of Artificial Sequence: Synthetic oligonucleotide
  source 1..20: mol_type = other RNA
ccacaggttgtgtcaccaga

SEQ ID NO: 119 - RNA, 20 nt, synthetic construct
  misc_feature 1..20: note = Description of Artificial Sequence: Synthetic oligonucleotide
  source 1..20: mol_type = other RNA
accacaggttgtgtcaccag

SEQ ID NO: 120 - RNA, 20 nt, synthetic construct
  misc_feature 1..20: note = Description of Artificial Sequence: Synthetic oligonucleotide
  source 1..20: mol_type = other RNA
aaccacaggttgtgtcacca

SEQ ID NO: 121 - RNA, 20 nt, synthetic construct
  misc_feature 1..20: note = Description of Artificial Sequence: Synthetic oligonucleotide
  source 1..20: mol_type = other RNA
taaccacaggttgtgtcacc

SEQ ID NO: 122 - RNA, 20 nt, synthetic construct
  misc_feature 1..20: note = Description of Artificial Sequence: Synthetic oligonucleotide
  source 1..20: mol_type = other RNA
gtaaccacaggttgtgtcac

SEQ ID NO: 123 - RNA, 20 nt, synthetic construct
  misc_feature 1..20: note = Description of Artificial Sequence: Synthetic oligonucleotide
  source 1..20: mol_type = other RNA
agtaaccacaggttgtgtca

SEQ ID NO: 124 - RNA, 20 nt, synthetic construct
  misc_feature 1..20: note = Description of Artificial Sequence: Synthetic oligonucleotide
  source 1..20: mol_type = other RNA
cttagtaaccacaggttgtg

SEQ ID NO: 125 - RNA, 20 nt, synthetic construct
  misc_feature 1..20: note = Description of Artificial Sequence: Synthetic oligonucleotide
  source 1..20: mol_type = other RNA
ccttagtaaccacaggttgt

SEQ ID NO: 126 - RNA, 20 nt, synthetic construct
  misc_feature 1..20: note = Description of Artificial Sequence: Synthetic oligonucleotide
  source 1..20: mol_type = other RNA
tccttagtaaccacaggttg

SEQ ID NO: 127 - RNA, 20 nt, synthetic construct
  misc_feature 1..20: note = Description of Artificial Sequence: Synthetic oligonucleotide
  source 1..20: mol_type = other RNA
ttccttagtaaccacaggtt

SEQ ID NO: 128 - RNA, 20 nt, synthetic construct
  misc_feature 1..20: note = Description of Artificial Sequence: Synthetic oligonucleotide
  source 1..20: mol_type = other RNA
tttccttagtaaccacaggt

SEQ ID NO: 129 - RNA, 20 nt, synthetic construct
  misc_feature 1..20: note = Description of Artificial Sequence: Synthetic oligonucleotide
  source 1..20: mol_type = other RNA
gtttccttagtaaccacagg

SEQ ID NO: 130 - RNA, 20 nt, synthetic construct
  misc_feature 1..20: note = Description of Artificial Sequence: Synthetic oligonucleotide
  source 1..20: mol_type = other RNA
agtttccttagtaaccacag

SEQ ID NO: 131 - RNA, 20 nt, synthetic construct
  misc_feature 1..20: note = Description of Artificial Sequence: Synthetic oligonucleotide
  source 1..20: mol_type = other RNA
gcagtttccttagtaaccac

SEQ ID NO: 132 - RNA, 20 nt, synthetic construct
  misc_feature 1..20: note = Description of Artificial Sequence: Synthetic oligonucleotide
  source 1..20: mol_type = other RNA
ggcagtttccttagtaacca

SEQ ID NO: 133 - RNA, 20 nt, synthetic construct
  misc_feature 1..20: note = Description of Artificial Sequence: Synthetic oligonucleotide
  source 1..20: mol_type = other RNA
tggcagtttccttagtaacc

SEQ ID NO: 134 - RNA, 20 nt, synthetic construct
  misc_feature 1..20: note = Description of Artificial Sequence: Synthetic oligonucleotide
  source 1..20: mol_type = other RNA
atggcagtttccttagtaac

SEQ ID NO: 135 - RNA, 20 nt, synthetic construct
  misc_feature 1..20: note = Description of Artificial Sequence: Synthetic oligonucleotide
  source 1..20: mol_type = other RNA
gatggcagtttccttagtaa

SEQ ID NO: 136 - RNA, 20 nt, synthetic construct
  misc_feature 1..20: note = Description of Artificial Sequence: Synthetic oligonucleotide
  source 1..20: mol_type = other RNA
agatggcagtttccttagta

SEQ ID NO: 137 - RNA, 20 nt, synthetic construct
  misc_feature 1..20: note = Description of Artificial Sequence: Synthetic oligonucleotide
  source 1..20: mol_type = other RNA
ggagatggcagtttccttag

SEQ ID NO: 138 - RNA, 20 nt, synthetic construct
  misc_feature 1..20: note = Description of Artificial Sequence: Synthetic oligonucleotide
  source 1..20: mol_type = other RNA
tggagatggcagtttcctta

SEQ ID NO: 139 - RNA, 20 nt, synthetic construct
  misc_feature 1..20: note = Description of Artificial Sequence: Synthetic oligonucleotide
  source 1..20: mol_type = other RNA
ttggagatggcagtttcctt

SEQ ID NO: 140 - RNA, 20 nt, synthetic construct
  misc_feature 1..20: note = Description of Artificial Sequence: Synthetic oligonucleotide
  source 1..20: mol_type = other RNA
tttggagatggcagtttcct

SEQ ID NO: 141 - RNA, 20 nt, synthetic construct
  misc_feature 1..20: note = Description of Artificial Sequence: Synthetic oligonucleotide
  source 1..20: mol_type = other RNA
gtttggagatggcagtttcc

SEQ ID NO: 142 - RNA, 20 nt, synthetic construct
  misc_feature 1..20: note = Description of Artificial Sequence: Synthetic oligonucleotide
  source 1..20: mol_type = other RNA
ctagtttggagatggcagtt

SEQ ID NO: 143 - RNA, 20 nt, synthetic construct
  misc_feature 1..20: note = Description of Artificial Sequence: Synthetic oligonucleotide
  source 1..20: mol_type = other RNA
tctagtttggagatggcagt

SEQ ID NO: 144 - RNA, 20 nt, synthetic construct
  misc_feature 1..20: note = Description of Artificial Sequence: Synthetic oligonucleotide
  source 1..20: mol_type = other RNA
atttctagtttggagatggc

SEQ ID NO: 145 - RNA, 20 nt, synthetic construct
  misc_feature 1..20: note = Description of Artificial Sequence: Synthetic oligonucleotide
  source 1..20: mol_type = other RNA
tggcatttctagtttggaga

SEQ ID NO: 146 - RNA, 20 nt, synthetic construct
  misc_feature 1..20: note = Description of Artificial Sequence: Synthetic oligonucleotide
  source 1..20: mol_type = other RNA
gatggcatttctagtttgga

SEQ ID NO: 147 - RNA, 20 nt, synthetic construct
  misc_feature 1..20: note = Description of Artificial Sequence: Synthetic oligonucleotide
  source 1..20: mol_type = other RNA
agatggcatttctagtttgg

SEQ ID NO: 148 - RNA, 20 nt, synthetic construct
  misc_feature 1..20: note = Description of Artificial Sequence: Synthetic oligonucleotide
  source 1..20: mol_type = other RNA
aagatggcatttctagtttg

SEQ ID NO: 149 - RNA, 20 nt, synthetic construct
  misc_feature 1..20: note = Description of Artificial Sequence: Synthetic oligonucleotide
  source 1..20: mol_type = other RNA
aggaagatggcatttctagt

SEQ ID NO: 150 - RNA, 20 nt, synthetic construct
  misc_feature 1..20: note = Description of Artificial Sequence: Synthetic oligonucleotide
  source 1..20: mol_type = other RNA
aaggaagatggcatttctag

SEQ ID NO: 151 - RNA, 20 nt, synthetic construct
  misc_feature 1..20: note = Description of Artificial Sequence: Synthetic oligonucleotide
  source 1..20: mol_type = other RNA
caaggaagatggcatttcta

SEQ ID NO: 152 - RNA, 20 nt, synthetic construct
  misc_feature 1..20: note = Description of Artificial Sequence: Synthetic oligonucleotide
  source 1..20: mol_type = other RNA
tcaaggaagatggcatttct

SEQ ID NO: 153 - RNA, 20 nt, synthetic construct
  misc_feature 1..20: note = Description of Artificial Sequence: Synthetic oligonucleotide
  source 1..20: mol_type = other RNA
acatcaaggaagatggcatt

SEQ ID NO: 154 - RNA, 20 nt, synthetic construct
  misc_feature 1..20: note = Description of Artificial Sequence: Synthetic oligonucleotide
  source 1..20: mol_type = other RNA
caacatcaaggaagatggca

SEQ ID NO: 155 - RNA, 20 nt, synthetic construct
  misc_feature 1..20: note = Description of Artificial Sequence: Synthetic oligonucleotide
  source 1..20: mol_type = other RNA
tccaacatcaaggaagatgg

SEQ ID NO: 156 - RNA, 20 nt, synthetic construct
  misc_feature 1..20: note = Description of Artificial Sequence: Synthetic oligonucleotide
  source 1..20: mol_type = other RNA
cctccaacatcaaggaagat

SEQ ID NO: 157 - RNA, 20 nt, synthetic construct
  misc_feature 1..20: note = Description of Artificial Sequence: Synthetic oligonucleotide
  source 1..20: mol_type = other RNA
aggtacctccaacatcaagg

SEQ ID NO: 158 - RNA, 20 nt, synthetic construct
  misc_feature 1..20: note = Description of Artificial Sequence: Synthetic oligonucleotide
  source 1..20: mol_type = other RNA
caggtacctccaacatcaag

SEQ ID NO: 159 - RNA, 20 nt, synthetic construct
  misc_feature 1..20: note = Description of Artificial Sequence: Synthetic oligonucleotide
  source 1..20: mol_type = other RNA
agagcaggtacctccaacat

SEQ ID NO: 160 - RNA, 20 nt, synthetic construct
  misc_feature 1..20: note = Description of Artificial Sequence: Synthetic oligonucleotide
  source 1..20: mol_type = other RNA
cagagcaggtacctccaaca

SEQ ID NO: 161 - RNA, 20 nt, synthetic construct
  misc_feature 1..20: note = Description of Artificial Sequence: Synthetic oligonucleotide
  source 1..20: mol_type = other RNA
ccagagcaggtacctccaac

SEQ ID NO: 162 - RNA, 20 nt, synthetic construct
  misc_feature 1..20: note = Description of Artificial Sequence: Synthetic oligonucleotide
  source 1..20: mol_type = other RNA
gccagagcaggtacctccaa

SEQ ID NO: 163 - RNA, 20 nt, synthetic construct
  misc_feature 1..20: note = Description of Artificial Sequence: Synthetic oligonucleotide
  source 1..20: mol_type = other RNA
tgccagagcaggtacctcca

SEQ ID NO: 164 - RNA, 20 nt, synthetic construct
  misc_feature 1..20: note = Description of Artificial Sequence: Synthetic oligonucleotide
  source 1..20: mol_type = other RNA
ctgccagagcaggtacctcc

SEQ ID NO: 165 - RNA, 20 nt, synthetic construct
  misc_feature 1..20: note = Description of Artificial Sequence: Synthetic oligonucleotide
  source 1..20: mol_type = other RNA
tctgccagagcaggtacctc

SEQ ID NO: 166 - RNA, 20 nt, synthetic construct
  misc_feature 1..20: note = Description of Artificial Sequence: Synthetic oligonucleotide
  source 1..20: mol_type = other RNA
atctgccagagcaggtacct

SEQ ID NO: 167 - RNA, 20 nt, synthetic construct
  misc_feature 1..20: note = Description of Artificial Sequence: Synthetic oligonucleotide
  source 1..20: mol_type = other RNA
ttgaaatctgccagagcagg

SEQ ID NO: 168 - RNA, 20 nt, synthetic construct
  misc_feature 1..20: note = Description of Artificial Sequence: Synthetic oligonucleotide
  source 1..20: mol_type = other RNA
cccggttgaaatctgccaga

SEQ ID NO: 169 - RNA, 20 nt, synthetic construct
  misc_feature 1..20: note = Description of Artificial Sequence: Synthetic oligonucleotide
  source 1..20: mol_type = other RNA
gcccggttgaaatctgccag

SEQ ID NO: 170 - RNA, 20 nt, synthetic construct
  misc_feature 1..20: note = Description of Artificial Sequence: Synthetic oligonucleotide
  source 1..20: mol_type = other RNA
agcccggttgaaatctgcca

SEQ ID NO: 171 - RNA, 20 nt, synthetic construct
  misc_feature 1..20: note = Description of Artificial Sequence: Synthetic oligonucleotide
  source 1..20: mol_type = other RNA
ccaagcccggttgaaatctg

SEQ ID NO: 172 - RNA, 20 nt, synthetic construct
  misc_feature 1..20: note = Description of Artificial Sequence: Synthetic oligonucleotide
  source 1..20: mol_type = other RNA
tccaagcccggttgaaatct

SEQ ID NO: 173 - RNA, 20 nt, synthetic construct
  misc_feature 1..20: note = Description of Artificial Sequence: Synthetic oligonucleotide
  source 1..20: mol_type = other RNA
gtccaagcccggttgaaatc

SEQ ID NO: 174 - RNA, 20 nt, synthetic construct
  misc_feature 1..20: note = Description of Artificial Sequence: Synthetic oligonucleotide
  source 1..20: mol_type = other RNA
tgtccaagcccggttgaaat

SEQ ID NO: 175 - RNA, 20 nt, synthetic construct
  misc_feature 1..20: note = Description of Artificial Sequence: Synthetic oligonucleotide
  source 1..20: mol_type = other RNA
ctgtccaagcccggttgaaa

SEQ ID NO: 176 - RNA, 20 nt, synthetic construct
  misc_feature 1..20: note = Description of Artificial Sequence: Synthetic oligonucleotide
  source 1..20: mol_type = other RNA
tctgtccaagcccggttgaa

SEQ ID NO: 177 - RNA, 20 nt, synthetic construct
  misc_feature 1..20: note = Description of Artificial Sequence: Synthetic oligonucleotide
  source 1..20: mol_type = other RNA
ttctgtccaagcccggttga

SEQ ID NO: 178 - RNA, 20 nt, synthetic construct
  misc_feature 1..20: note = Description of Artificial Sequence: Synthetic oligonucleotide
  source 1..20: mol_type = other RNA
gttctgtccaagcccggttg

SEQ ID NO: 179 - RNA, 20 nt, synthetic construct
  misc_feature 1..20: note = Description of Artificial Sequence: Synthetic oligonucleotide
  source 1..20: mol_type = other RNA
agttctgtccaagcccggtt

SEQ ID NO: 180 - RNA, 20 nt, synthetic construct
  misc_feature 1..20: note = Description of Artificial Sequence: Synthetic oligonucleotide
  source 1..20: mol_type = other RNA
aagttctgtccaagcccggt

SEQ ID NO: 181 - RNA, 20 nt, synthetic construct
  misc_feature 1..20: note = Description of Artificial Sequence: Synthetic oligonucleotide
  source 1..20: mol_type = other RNA
taagttctgtccaagcccgg

SEQ ID NO: 182 - RNA, 20 nt, synthetic construct
  misc_feature 1..20: note = Description of Artificial Sequence: Synthetic oligonucleotide
  source 1..20: mol_type = other RNA
gtaagttctgtccaagcccg

SEQ ID NO: 183 - RNA, 20 nt, synthetic construct
  misc_feature 1..20: note = Description of Artificial Sequence: Synthetic oligonucleotide
  source 1..20: mol_type = other RNA
ggtaagttctgtccaagccc

SEQ ID NO: 184 - RNA, 20 nt, synthetic construct
  misc_feature 1..20: note = Description of Artificial Sequence: Synthetic oligonucleotide
  source 1..20: mol_type = other RNA
cagtcggtaagttctgtcca

SEQ ID NO: 185 - RNA, 20 nt, synthetic construct
  misc_feature 1..20: note = Description of Artificial Sequence: Synthetic oligonucleotide
  source 1..20: mol_type = other RNA
ccagtcggtaagttctgtcc

SEQ ID NO: 186 - RNA, 20 nt, synthetic construct
  misc_feature 1..20: note = Description of Artificial Sequence: Synthetic oligonucleotide
  source 1..20: mol_type = other RNA
ccaccatcaccctctgtgat

SEQ ID NO: 187 - RNA, 20 nt, synthetic construct
  misc_feature 1..20: note = Description of Artificial Sequence: Synthetic oligonucleotide
  source 1..20: mol_type = other RNA
cccaccatcaccctctgtga

SEQ ID NO: 188 - RNA, 20 nt, synthetic construct
  misc_feature 1..20: note = Description of Artificial Sequence: Synthetic oligonucleotide
  source 1..20: mol_type = other RNA
cacccaccatcaccctctgt

SEQ ID NO: 189 - RNA, 20 nt, synthetic construct
  misc_feature 1..20: note = Description of Artificial Sequence: Synthetic oligonucleotide
  source 1..20: mol_type = other RNA
tcacccaccatcaccctctg

SEQ ID NO: 190 - RNA, 20 nt, synthetic construct
  misc_feature 1..20: note = Description of Artificial Sequence: Synthetic oligonucleotide
  source 1..20: mol_type = other RNA
gtcacccaccatcaccctct

SEQ ID NO: 191 - RNA, 20 nt, synthetic construct
  misc_feature 1..20: note = Description of Artificial Sequence: Synthetic oligonucleotide
  source 1..20: mol_type = other RNA
ggtcacccaccatcaccctc

SEQ ID NO: 192 - RNA, 20 nt, synthetic construct
  misc_feature 1..20: note = Description of Artificial Sequence: Synthetic oligonucleotide
  source 1..20: mol_type = other RNA
tcaagcagagaaagccagtc

SEQ ID NO: 193 - RNA, 20 nt, synthetic construct
  misc_feature 1..20: note = Description of Artificial Sequence: Synthetic oligonucleotide
  source 1..20: mol_type = other RNA
ttgatcaagcagagaaagcc

SEQ ID NO: 194 - RNA, 25 nt, synthetic construct
  misc_feature 1..25: note = Description of Artificial Sequence: Synthetic oligonucleotide
  source 1..25: mol_type = other RNA
caaagaagatggcatttctagtttg

SEQ ID NO: 195 - RNA, 20 nt, synthetic construct
  misc_feature 1..20: note = Description of Artificial Sequence: Synthetic oligonucleotide
  source 1..20: mol_type = other RNA
gcaaagaagatggcatttct

SEQ ID NO: 196 - RNA, 20 nt, synthetic construct
  misc_feature 1..20: note = Description of Artificial Sequence: Synthetic oligonucleotide
  source 1..20: mol_type = other RNA
gcaaagaagatggcatttct

SEQ ID NO: 197 - RNA, 20 nt, synthetic construct
  misc_feature 1..20: note = Description of Artificial Sequence: Synthetic oligonucleotide
  source 1..20: mol_type = other RNA
tcaaggaagatggcatttct

SEQ ID NO: 198 - RNA, 20 nt, synthetic construct
  misc_feature 1..20: note = Description of Artificial Sequence: Synthetic oligonucleotide
  source 1..20: mol_type = other RNA
tcaaggaagatggcatttct

SEQ ID NO: 199 - RNA, 20 nt, synthetic construct
  misc_feature 1..20: note = Description of Artificial Sequence: Synthetic oligonucleotide
  source 1..20: mol_type = other RNA
tcaaggaagatggcatttct

SEQ ID NO: 200 - RNA, 20 nt, synthetic construct
  misc_feature 1..20: note = Description of Artificial Sequence: Synthetic oligonucleotide
  source 1..20: mol_type = other RNA
tcaaggaagatggcatttct

SEQ ID NO: 201 - RNA, 20 nt, synthetic construct
  misc_feature 1..20: note = Description of Artificial Sequence: Synthetic oligonucleotide
  source 1..20: mol_type = other RNA
tcaaggaagatggcatttct

SEQ ID NO: 202 - RNA, 20 nt, synthetic construct
  misc_feature 1..20: note = Description of Artificial Sequence: Synthetic oligonucleotide
  source 1..20: mol_type = other RNA
tcaaggaagatggcatttct

SEQ ID NO: 203 - RNA, 20 nt, synthetic construct
  misc_feature 1..20: note = Description of Artificial Sequence: Synthetic oligonucleotide
  source 1..20: mol_type = other RNA
tcaaggaagatggcatttct

SEQ ID NO: 204 - RNA, 20 nt, synthetic construct
  misc_feature 1..20: note = Description of Artificial Sequence: Synthetic oligonucleotide
  source 1..20: mol_type = other RNA
tcaaggaagatggcatttct

SEQ ID NO: 205 - RNA, 20 nt, synthetic construct
  misc_feature 1..20: note = Description of Artificial Sequence: Synthetic oligonucleotide
  source 1..20: mol_type = other RNA
tcaaggaagatggcatttct

SEQ ID NO: 206 - RNA, 20 nt, synthetic construct
  misc_feature 1..20: note = Description of Artificial Sequence: Synthetic oligonucleotide
  source 1..20: mol_type = other RNA
tcaaggaagatggcatttct

SEQ ID NO: 207 - RNA, 20 nt, synthetic construct
  misc_feature 1..20: note = Description of Artificial Sequence: Synthetic oligonucleotide
  source 1..20: mol_type = other RNA
tcaaggaagatggcatttct

SEQ ID NO: 208 - RNA, 20 nt, synthetic construct
  misc_feature 1..20: note = Description of Artificial Sequence: Synthetic oligonucleotide
  source 1..20: mol_type = other RNA
tcaaggaagatggcatttct

SEQ ID NO: 209 - RNA, 20 nt, synthetic construct
  misc_feature 1..20: note = Description of Artificial Sequence: Synthetic oligonucleotide
  source 1..20: mol_type = other RNA
tcaaggaagatggcatttct

SEQ ID NO: 210 - RNA, 20 nt, synthetic construct
  misc_feature 1..20: note = Description of Artificial Sequence: Synthetic oligonucleotide
  source 1..20: mol_type = other RNA
tcaaggaagatggcatttct

SEQ ID NO: 211 - RNA, 20 nt, synthetic construct
  misc_feature 1..20: note = Description of Artificial Sequence: Synthetic oligonucleotide
  source 1..20: mol_type = other RNA
tcaaggaagatggcatttct

SEQ ID NO: 212 - RNA, 20 nt, synthetic construct
  misc_feature 1..20: note = Description of Artificial Sequence: Synthetic oligonucleotide
  source 1..20: mol_type = other RNA
tcaaggaagatggcatttct

SEQ ID NO: 213 - RNA, 20 nt, synthetic construct
  misc_feature 1..20: note = Description of Artificial Sequence: Synthetic oligonucleotide
  source 1..20: mol_type = other RNA
tcaaggaagatggcatttct

SEQ ID NO: 214 - RNA, 20 nt, synthetic construct
  misc_feature 1..20: note = Description of Artificial Sequence: Synthetic oligonucleotide
  source 1..20: mol_type = other RNA
tcaaggaagatggcatttct

SEQ ID NO: 215 - RNA, 20 nt, synthetic construct
  misc_feature 1..20: note = Description of Artificial Sequence: Synthetic oligonucleotide
  source 1..20: mol_type = other RNA
tcaaggaagatggcatttct

SEQ ID NO: 216 - RNA, 20 nt, synthetic construct
  misc_feature 1..20: note = Description of Artificial Sequence: Synthetic oligonucleotide
  source 1..20: mol_type = other RNA
tcaaggaagatggcatttct

SEQ ID NO: 217 - RNA, 20 nt, synthetic construct
  misc_feature 1..20: note = Description of Artificial Sequence: Synthetic oligonucleotide
  source 1..20: mol_type = other RNA
tcaaggaagatggcatttct

SEQ ID NO: 218 - RNA, 20 nt, synthetic construct
  misc_feature 1..20: note = Description of Artificial Sequence: Synthetic oligonucleotide
  source 1..20: mol_type = other RNA
tcaaggaagatggcatttct

SEQ ID NO: 219 - RNA, 20 nt, synthetic construct
  misc_feature 1..20: note = Description of Artificial Sequence: Synthetic oligonucleotide
  source 1..20: mol_type = other RNA
tcaaggaagatggcatttct

SEQ ID NO: 220 - RNA, 20 nt, synthetic construct
  misc_feature 1..20: note = Description of Artificial Sequence: Synthetic oligonucleotide
  source 1..20: mol_type = other RNA
tcaaggaagatggcatttct

SEQ ID NO: 221 - RNA, 20 nt, synthetic construct
  misc_feature 1..20: note = Description of Artificial Sequence: Synthetic oligonucleotide
  source 1..20: mol_type = other RNA
tcaaggaagatggcatttct

SEQ ID NO: 222 - RNA, 20 nt, synthetic construct
  misc_feature 1..20: note = Description of Artificial Sequence: Synthetic oligonucleotide
  source 1..20: mol_type = other RNA
tcaaggaagatggcatttct

SEQ ID NO: 223 - RNA, 20 nt, synthetic construct
  misc_feature 1..20: note = Description of Artificial Sequence: Synthetic oligonucleotide
  source 1..20: mol_type = other RNA
tcaaggaagatggcatttct

SEQ ID NO: 224 - RNA, 20 nt, synthetic construct
  misc_feature 1..20: note = Description of Artificial Sequence: Synthetic oligonucleotide
  source 1..20: mol_type = other RNA
tcaaggaagatggcatttct

SEQ ID NO: 225 - RNA, 20 nt, synthetic construct
  misc_feature 1..20: note = Description of Artificial Sequence: Synthetic oligonucleotide
  source 1..20: mol_type = other RNA
tcaaggaagatggcatttct

SEQ ID NO: 226 - RNA, 20 nt, synthetic construct
  misc_feature 1..20: note = Description of Artificial Sequence: Synthetic oligonucleotide
  source 1..20: mol_type = other RNA
ggccaaacctcggcttacct

SEQ ID NO: 227 - RNA, 20 nt, synthetic construct
  misc_feature 1..20: note = Description of Artificial Sequence: Synthetic oligonucleotide
  source 1..20: mol_type = other RNA
ggccaaacctcggcttacct

SEQ ID NO: 228 - RNA, 20 nt, synthetic construct
  misc_feature 1..20: note = Description of Artificial Sequence: Synthetic oligonucleotide
  source 1..20: mol_type = other RNA
ggccaaacctcggcttacct

SEQ ID NO: 229 - RNA, 20 nt, synthetic construct
  misc_feature 1..20: note = Description of Artificial Sequence: Synthetic oligonucleotide
  source 1..20: mol_type = other RNA
ggccaaacctcggcttacct

SEQ ID NO: 230 - RNA, 20 nt, synthetic construct
  misc_feature 1..20: note = Description of Artificial Sequence: Synthetic oligonucleotide
  source 1..20: mol_type = other RNA
ggccaaacctcggcttacct

SEQ ID NO: 231 - RNA, 20 nt, synthetic construct
  misc_feature 1..20: note = Description of Artificial Sequence: Synthetic oligonucleotide
  source 1..20: mol_type = other RNA
ggccaaacctcggcttacct

SEQ ID NO: 232 - RNA, 20 nt, synthetic construct
  misc_feature 1..20: note = Description of Artificial Sequence: Synthetic oligonucleotide
  source 1..20: mol_type = other RNA
ggccaaacctcggcttacct

SEQ ID NO: 233 - RNA, 20 nt, synthetic construct
  misc_feature 1..20: note = Description of Artificial Sequence: Synthetic oligonucleotide
  source 1..20: mol_type = other RNA
ggccaaacctcggcttacct

SEQ ID NO: 234 - RNA, 20 nt, synthetic construct
  misc_feature 1..20: note = Description of Artificial Sequence: Synthetic oligonucleotide
  source 1..20: mol_type = other RNA
tcaaggaagatggcatttct

SEQ ID NO: 235 - RNA, 20 nt, synthetic construct
  misc_feature 1..20: note = Description of Artificial Sequence: Synthetic oligonucleotide
  source 1..20: mol_type = other RNA
tcaaggaagatggcatttct

SEQ ID NO: 236 - RNA, 20 nt, synthetic construct
  misc_feature 1..20: note = Description of Artificial Sequence: Synthetic oligonucleotide
  source 1..20: mol_type = other RNA
tcaaggaagatggcatttct

SEQ ID NO: 237 - RNA, 20 nt, synthetic construct
  misc_feature 1..20: note = Description of Artificial Sequence: Synthetic oligonucleotide
  source 1..20: mol_type = other RNA
tcaaggaagatggcatttct

SEQ ID NO: 238 - RNA, 20 nt, synthetic construct
  misc_feature 1..20: note = Description of Artificial Sequence: Synthetic oligonucleotide
  source 1..20: mol_type = other RNA
tcaaggaagatggcatttct

SEQ ID NO: 239 - RNA, 20 nt, synthetic construct
  misc_feature 1..20: note = Description of Artificial Sequence: Synthetic oligonucleotide
  source 1..20: mol_type = other RNA
tcaaggaagatggcatttct

SEQ ID NO: 240 - RNA, 20 nt, synthetic construct
  misc_feature 1..20: note = Description of Artificial Sequence: Synthetic oligonucleotide
  source 1..20: mol_type = other RNA
tcaaggaagatggcatttct

SEQ ID NO: 241 - RNA, 20 nt, synthetic construct
  misc_feature 1..20: note = Description of Artificial Sequence: Synthetic oligonucleotide
  source 1..20: mol_type = other RNA
tcaaggaagatggcatttct

SEQ ID NO: 242 - DNA, 20 bp, synthetic construct
  misc_feature 1..20: note = Description of Artificial Sequence: Synthetic oligonucleotide
  source 1..20: mol_type = other DNA
ggccaaacctcggcttacct

SEQ ID NO: 243 - RNA, 20 nt, synthetic construct
  misc_feature 1..20: note = Description of Artificial Sequence: Synthetic oligonucleotide
  source 1..20: mol_type = other RNA
ggccaaacctcggcttacct

SEQ ID NO: 244 - DNA, 20 bp, synthetic construct
  misc_feature 1..20: note = Description of Artificial Sequence: Synthetic oligonucleotide
  source 1..20: mol_type = other DNA
ggccaaacctcggcttacct

SEQ ID NO: 245 - DNA, 20 bp, synthetic construct
  misc_feature 1..20: note = Description of Artificial Sequence: Synthetic oligonucleotide
  source 1..20: mol_type = other DNA
ggccaaacctcggcttacct

SEQ ID NO: 246 - DNA, 20 bp, synthetic construct
  misc_feature 1..20: note = Synthetic oligonucleotide
  modified_base 10: mod_base = OTHER; note = uracil
  source 1..20: mol_type = other DNA
ggccaaacctcggcttacct

SEQ ID NO: 247 - DNA, 20 bp, synthetic construct
  misc_feature 1..20: note = Synthetic oligonucleotide
  modified_base 20: mod_base = OTHER; note = uracil
  source 1..20: mol_type = other DNA
ggccaaacctcggcttacct

SEQ ID NO: 248 - DNA, 20 bp, synthetic construct
  misc_feature 1..20: note = Synthetic oligonucleotide
  modified_base 10: mod_base = OTHER; note = uracil
  modified_base 16: mod_base = OTHER; note = uracil
  modified_base 20: mod_base = OTHER; note = uracil
  source 1..20: mol_type = other DNA
ggccaaacctcggcttacct

SEQ ID NO: 249 - DNA, 20 bp, synthetic construct
  misc_feature 1..20: note = Synthetic oligonucleotide
  modified_base 15: mod_base = OTHER; note = uracil
  modified_base 20: mod_base = OTHER; note = uracil
  source 1..20: mol_type = other DNA
ggccaaacctcggcttacct

SEQ ID NO: 250 - DNA, 20 bp, synthetic construct
  misc_feature 1..20: note = Synthetic oligonucleotide
  modified_base 16: mod_base = OTHER; note = uracil
  modified_base 20: mod_base = OTHER; note = uracil
  source 1..20: mol_type = other DNA
ggccaaacctcggcttacct

SEQ ID NO: 251 - RNA, 20 nt, synthetic construct
  misc_feature 1..20: note = Description of Artificial Sequence: Synthetic oligonucleotide
  source 1..20: mol_type = other RNA
ggccaaacctcggcttacct

SEQ ID NO: 252 - DNA, 20 bp, synthetic construct
  misc_feature 1..20: note = Synthetic oligonucleotide
  modified_base 15: mod_base = OTHER; note = uracil
  modified_base 20: mod_base = OTHER; note = uracil
  source 1..20: mol_type = other DNA
ggccaaacctcggcttacct

SEQ ID NO: 253 - DNA, 20 bp, synthetic construct
  misc_feature 1..20: note = Synthetic oligonucleotide
  modified_base 16: mod_base = OTHER; note = uracil
  modified_base 20: mod_base = OTHER; note = uracil
  source 1..20: mol_type = other DNA
ggccaaacctcggcttacct

SEQ ID NO: 254 - DNA, 20 bp, synthetic construct
  misc_feature 1..20: note = Synthetic oligonucleotide
  modified_base 10: mod_base = OTHER; note = uracil
  modified_base 20: mod_base = OTHER; note = uracil
  source 1..20: mol_type = other DNA
ggccaaacctcggcttacct

SEQ ID NO: 255 - DNA, 20 bp, synthetic construct
  misc_feature 1..20: note = Synthetic oligonucleotide
  modified_base 10: mod_base = OTHER; note = uracil
  source 1..20: mol_type = other DNA
ggccaaacctcggcttacct

SEQ ID NO: 256 - DNA, 20 bp, synthetic construct
  misc_feature 1..20: note = Synthetic oligonucleotide
  modified_base 20: mod_base = OTHER; note = uracil
  source 1..20: mol_type = other DNA
ggccaaacctcggcttacct

SEQ ID NO: 257 - DNA, 20 bp, synthetic construct
  misc_feature 1..20: note = Synthetic oligonucleotide
  modified_base 10: mod_base = OTHER; note = uracil
  modified_base 16: mod_base = OTHER; note = uracil
  modified_base 20: mod_base = OTHER; note = uracil
  source 1..20: mol_type = other DNA
ggccaaacctcggcttacct

SEQ ID NO: 258 - DNA, 20 bp, synthetic construct
  misc_feature 1..20: note = Synthetic oligonucleotide
  modified_base 15: mod_base = OTHER; note = uracil
  modified_base 20: mod_base = OTHER; note = uracil
  source 1..20: mol_type = other DNA
ggccaaacctcggcttacct

SEQ ID NO: 259 - DNA, 20 bp, synthetic construct
  misc_feature 1..20: note = Synthetic oligonucleotide
  modified_base 16: mod_base = OTHER; note = uracil
  modified_base 20: mod_base = OTHER; note = uracil
  source 1..20: mol_type = other DNA
ggccaaacctcggcttacct

SEQ ID NO: 260 - RNA, 20 nt, synthetic construct
  misc_feature 1..20: note = Description of Artificial Sequence: Synthetic oligonucleotide
  source 1..20: mol_type = other RNA
ggccaaacctcggcttacct

SEQ ID NO: 261 - DNA, 20 bp, synthetic construct
  misc_feature 1..20: note = Synthetic oligonucleotide
  modified_base 15: mod_base = OTHER; note = uracil
  modified_base 20: mod_base = OTHER; note = uracil
  source 1..20: mol_type = other DNA
ggccaaacctcggcttacct

SEQ ID NO: 262 - DNA, 20 bp, synthetic construct
  misc_feature 1..20: note = Synthetic oligonucleotide
  modified_base 16: mod_base = OTHER; note = uracil
  modified_base 20: mod_base = OTHER; note = uracil
  source 1..20: mol_type = other DNA
ggccaaacctcggcttacct

SEQ ID NO: 263 - DNA, 20 bp, synthetic construct
  misc_feature 1..20: note = Synthetic oligonucleotide
  modified_base 10: mod_base = OTHER; note = uracil
  modified_base 20: mod_base = OTHER; note = uracil
  source 1..20: mol_type = other DNA
ggccaaacctcggcttacct

SEQ ID NO: 264 - DNA, 20 bp, synthetic construct
  misc_feature 1..20: note = Synthetic oligonucleotide
  modified_base 10: mod_base = OTHER; note = uracil
  modified_base 15: mod_base = OTHER; note = uracil
  modified_base 20: mod_base = OTHER; note = uracil
  source 1..20: mol_type = other DNA
ggccaaacctcggcttacct

SEQ ID NO: 265 - RNA, 20 nt, synthetic construct
  misc_feature 1..20: note = Description of Artificial Sequence: Synthetic oligonucleotide
  source 1..20: mol_type = other RNA
ggccaaacctcggcttacct

SEQ ID NO: 266 - RNA, 20 nt, synthetic construct
  misc_feature 1..20: note = Description of Artificial Sequence: Synthetic oligonucleotide
  source 1..20: mol_type = other RNA
ggccaaacctcggcttacct

SEQ ID NO: 267 - RNA, 20 nt, synthetic construct
  misc_feature 1..20: note = Description of Artificial Sequence: Synthetic oligonucleotide
  source 1..20: mol_type = other RNA
ggccaaacctcggcttacct

SEQ ID NO: 268 - RNA, 20 nt, synthetic construct
  misc_feature 1..20: note = Description of Artificial Sequence: Synthetic oligonucleotide
  source 1..20: mol_type = other RNA
ggccaaacctcggcttacct

SEQ ID NO: 269 - RNA, 20 nt, synthetic construct
  misc_feature 1..20: note = Description of Artificial Sequence: Synthetic oligonucleotide
  source 1..20: mol_type = other RNA
ggccaaacctcggcttacct

SEQ ID NO: 270 - RNA, 20 nt, synthetic construct
  misc_feature 1..20: note = Description of Artificial Sequence: Synthetic oligonucleotide
  source 1..20: mol_type = other RNA
ggccaaacctcggcttacct

SEQ ID NO: 271 - RNA, 20 nt, synthetic construct
  misc_feature 1..20: note = Description of Artificial Sequence: Synthetic oligonucleotide
  source 1..20: mol_type = other RNA
ggccaaacctcggcttacct

SEQ ID NO: 272 - RNA, 20 nt, synthetic construct
  misc_feature 1..20: note = Description of Artificial Sequence: Synthetic oligonucleotide
  source 1..20: mol_type = other RNA
ggccaaacctcggcttacct

SEQ ID NO: 273 - RNA, 20 nt, synthetic construct
  misc_feature 1..20: note = Description of Artificial Sequence: Synthetic oligonucleotide
  source 1..20: mol_type = other RNA
ggccaaacctcggcttacct

SEQ ID NO: 274 - RNA, 20 nt, synthetic construct
  misc_feature 1..20: note = Description of Artificial Sequence: Synthetic oligonucleotide
  source 1..20: mol_type = other RNA
ggccaaacctcggcttacct

SEQ ID NO: 275 - RNA, 20 nt, synthetic construct
  misc_feature 1..20: note = Description of Artificial Sequence: Synthetic oligonucleotide
  source 1..20: mol_type = other RNA
ggccaaacctcggcttacct

SEQ ID NO: 276 - RNA, 25 nt, synthetic construct
  misc_feature 1..25: note = Description of Artificial Sequence: Synthetic oligonucleotide
  source 1..25: mol_type = other RNA
ggccaaacctcggcttacctgaaat

SEQ ID NO: 277 - DNA, 20 bp, synthetic construct
  misc_feature 1..20: note = Synthetic oligonucleotide
  modified_base 10: mod_base = OTHER; note = uracil
  modified_base 15: mod_base = OTHER; note = uracil
  modified_base 20: mod_base = OTHER; note = uracil
  source 1..20: mol_type = other DNA
ggccaaacctcggcttacct

SEQ ID NO: 278 - DNA, 20 bp, synthetic construct
  misc_feature 1..20: note = Description of Artificial Sequence: Synthetic oligonucleotide
  source 1..20: mol_type = other DNA
tcaaggaagatggcatttct

SEQ ID NO: 279 - RNA, 20 nt, synthetic construct
  misc_feature 1..20: note = Description of Artificial Sequence: Synthetic oligonucleotide
  source 1..20: mol_type = other RNA
tcaaggaagatggcatttct

SEQ ID NO: 280 - DNA, 20 bp, synthetic construct
  misc_feature 1..20: note = Description of Artificial Sequence: Synthetic oligonucleotide
  source 1..20: mol_type = other DNA
tcaaggaagatggcatttct

SEQ ID NO: 281 - DNA, 20 bp, synthetic construct
  misc_feature 1..20: note = Description of Artificial Sequence: Synthetic oligonucleotide
  source 1..20: mol_type = other DNA
tcaaggaagatggcatttct

SEQ ID NO: 282 - DNA, 20 bp, synthetic construct
  misc_feature 1..20: note = Synthetic oligonucleotide
  modified_base 11: mod_base = OTHER; note = uracil
  source 1..20: mol_type = other DNA
tcaaggaagatggcatttct

SEQ ID NO: 283 - DNA, 20 bp, synthetic construct
  misc_feature 1..20: note = Synthetic oligonucleotide
  modified_base 1: mod_base = OTHER; note = uracil
  modified_base 17..18: mod_base = OTHER; note = uracil
  modified_base 20: mod_base = OTHER; note = uracil
  source 1..20: mol_type = other DNA
tcaaggaagatggcatttct

SEQ ID NO: 284 - DNA, 20 bp, synthetic construct
  misc_feature 1..20: note = Synthetic oligonucleotide
  modified_base 16: mod_base = OTHER; note = uracil
  modified_base 18: mod_base = OTHER; note = uracil
  modified_base 20: mod_base = OTHER; note = uracil
  source 1..20: mol_type = other DNA
tcaaggaagatggcatttct

SEQ ID NO: 285 - DNA, 20 bp, synthetic construct
  misc_feature 1..20: note = Synthetic oligonucleotide
  modified_base 1: mod_base = OTHER; note = uracil
  modified_base 11: mod_base = OTHER; note = uracil
  modified_base 17: mod_base = OTHER; note = uracil
  modified_base 20: mod_base = OTHER; note = uracil
  source 1..20: mol_type = other DNA
tcaaggaagatggcatttct

SEQ ID NO: 286 - DNA, 20 bp, synthetic construct
  misc_feature 1..20: note = Synthetic oligonucleotide
  modified_base 16..17: mod_base = OTHER; note = uracil
  modified_base 20: mod_base = OTHER; note = uracil
  source 1..20: mol_type = other DNA
tcaaggaagatggcatttct

SEQ ID NO: 287 - DNA, 20 bp, synthetic construct
  misc_feature 1..20: note = Synthetic oligonucleotide
  modified_base 11: mod_base = OTHER; note = uracil
  modified_base 16: mod_base = OTHER; note = uracil
  modified_base 20: mod_base = OTHER; note = uracil
  source 1..20: mol_type = other DNA
tcaaggaagatggcatttct

SEQ ID NO: 288 - DNA, 20 bp, synthetic construct
  misc_feature 1..20: note = Synthetic oligonucleotide
  modified_base 20: mod_base = OTHER; note = uracil
  source 1..20: mol_type = other DNA
tcaaggaagatggcatttct

SEQ ID NO: 289 - DNA, 20 bp, synthetic construct
  misc_feature 1..20: note = Synthetic oligonucleotide
  modified_base 16: mod_base = OTHER; note = uracil
  modified_base 20: mod_base = OTHER; note = uracil
  source 1..20: mol_type = other DNA
tcaaggaagatggcatttct

SEQ ID NO: 290 - DNA, 20 bp, synthetic construct
  misc_feature 1..20: note = Synthetic oligonucleotide
  modified_base 1: mod_base = OTHER; note = uracil
  modified_base 11: mod_base = OTHER; note = uracil
  modified_base 20: mod_base = OTHER; note = uracil
  source 1..20: mol_type = other DNA
tcaaggaagatggcatttct

SEQ ID NO: 291 - DNA, 20 bp, synthetic construct
  misc_feature 1..20: note = Synthetic oligonucleotide
  modified_base 20: mod_base = OTHER; note = uracil
  source 1..20: mol_type = other DNA
tcaaggaagatggcatttct

SEQ ID NO: 292 - DNA, 20 bp, synthetic construct
  misc_feature 1..20: note = Synthetic oligonucleotide
  modified_base 11: mod_base = OTHER; note = uracil
  source 1..20: mol_type = other DNA
tcaaggaagatggcatttct

SEQ ID NO: 293 - DNA, 20 bp, synthetic construct
  misc_feature 1..20: note = Synthetic oligonucleotide
  modified_base 1: mod_base = OTHER; note = uracil
  modified_base 17..18: mod_base = OTHER; note = uracil
  modified_base 20: mod_base = OTHER; note = uracil
  source 1..20: mol_type = other DNA
tcaaggaagatggcatttct

SEQ ID NO: 294 - DNA, 20 bp, synthetic construct
  misc_feature 1..20: note = Synthetic oligonucleotide
  modified_base 16: mod_base = OTHER; note = uracil
  modified_base 18: mod_base = OTHER; note = uracil
  modified_base 20: mod_base = OTHER; note = uracil
  source 1..20: mol_type = other DNA
tcaaggaagatggcatttct

SEQ ID NO: 295 - DNA, 20 bp, synthetic construct
  misc_feature 1..20: note = Synthetic oligonucleotide
  modified_base 1: mod_base = OTHER; note = uracil
  modified_base 11: mod_base = OTHER; note = uracil
  modified_base 17: mod_base = OTHER; note = uracil
  modified_base 20: mod_base = OTHER; note = uracil
  source 1..20: mol_type = other DNA
tcaaggaagatggcatttct

SEQ ID NO: 296 - DNA, 20 bp, synthetic construct
  misc_feature 1..20: note = Synthetic oligonucleotide
  modified_base 16..17: mod_base = OTHER; note = uracil
  modified_base 20: mod_base = OTHER; note = uracil
  source 1..20: mol_type = other DNA
tcaaggaagatggcatttct

SEQ ID NO: 297 - DNA, 20 bp, synthetic construct
  misc_feature 1..20: note = Synthetic oligonucleotide
  modified_base 11: mod_base = OTHER; note = uracil
  modified_base 16: mod_base = OTHER; note = uracil
  modified_base 20: mod_base = OTHER; note = uracil
  source 1..20: mol_type = other DNA
tcaaggaagatggcatttct

SEQ ID NO: 298 - DNA, 20 bp, synthetic construct
  misc_feature 1..20: note = Synthetic oligonucleotide
  modified_base 20: mod_base = OTHER; note = uracil
  source 1..20: mol_type = other DNA
tcaaggaagatggcatttct

SEQ ID NO: 299 - DNA, 20 bp, synthetic construct
  misc_feature 1..20: note = Synthetic oligonucleotide
  modified_base 16: mod_base = OTHER; note = uracil
  modified_base 20: mod_base = OTHER; note = uracil
  source 1..20: mol_type = other DNA
tcaaggaagatggcatttct

SEQ ID NO: 300 - DNA, 20 bp, synthetic construct
  misc_feature 1..20: note = Synthetic oligonucleotide
  modified_base 1: mod_base = OTHER; note = uracil
  modified_base 11: mod_base = OTHER; note = uracil
  modified_base 20: mod_base = OTHER; note = uracil
  source 1..20: mol_type = other DNA
tcaaggaagatggcatttct

SEQ ID NO: 301 - DNA, 20 bp, synthetic construct
  misc_feature 1..20: note = Synthetic oligonucleotide
  modified_base 20: mod_base = OTHER; note = uracil
  source 1..20: mol_type = other DNA
tcaaggaagatggcatttct

SEQ ID NO: 302 - RNA, 20 nt, synthetic construct
  misc_feature 1..20: note = Description of Artificial Sequence: Synthetic oligonucleotide
  source 1..20: mol_type = other RNA
tcaaggaagatggcatttct

SEQ ID NO: 303 - RNA, 20 nt, synthetic construct
  misc_feature 1..20: note = Description of Artificial Sequence: Synthetic oligonucleotide
  source 1..20: mol_type = other RNA
tcaaggaagatggcatttct

SEQ ID NO: 304 - RNA, 20 nt, synthetic construct
  misc_feature 1..20: note = Description of Artificial Sequence: Synthetic oligonucleotide
  source 1..20: mol_type = other RNA
tcaaggaagatggcatttct

SEQ ID NO: 305 - RNA, 20 nt, synthetic construct
  misc_feature 1..20: note = Description of Artificial Sequence: Synthetic oligonucleotide
  source 1..20: mol_type = other RNA
tcaaggaagatggcatttct

SEQ ID NO: 306 - RNA, 20 nt, synthetic construct
  misc_feature 1..20: note = Description of Artificial Sequence: Synthetic oligonucleotide
  source 1..20: mol_type = other RNA
tcaaggaagatggcatttct

SEQ ID NO: 307 - RNA, 20 nt, synthetic construct
  misc_feature 1..20: note = Description of Artificial Sequence: Synthetic oligonucleotide
  source 1..20: mol_type = other RNA
tcaaggaagatggcatttct

SEQ ID NO: 308 - RNA, 20 nt, synthetic construct
  misc_feature 1..20: note = Description of Artificial Sequence: Synthetic oligonucleotide
  source 1..20: mol_type = other RNA
tcaaggaagatggcatttct

SEQ ID NO: 309 - RNA, 20 nt, synthetic construct
  misc_feature 1..20: note = Description of Artificial Sequence: Synthetic oligonucleotide
  source 1..20: mol_type = other RNA
tcaaggaagatggcatttct

SEQ ID NO: 310 - RNA, 20 nt, synthetic construct
  misc_feature 1..20: note = Description of Artificial Sequence: Synthetic oligonucleotide
  source 1..20: mol_type = other RNA
tcaaggaagatggcatttct

SEQ ID NO: 311 - RNA, 20 nt, synthetic construct
  misc_feature 1..20: note = Description of Artificial Sequence: Synthetic oligonucleotide
  source 1..20: mol_type = other RNA
tcaaggaagatggcatttct

SEQ ID NO: 312 - RNA, 20 nt, synthetic construct
  misc_feature 1..20: note = Description of Artificial Sequence: Synthetic oligonucleotide
  source 1..20: mol_type = other RNA
agaaatgccatcttccttga

SEQ ID NO: 313 - RNA, 20 nt, synthetic construct
  misc_feature 1..20: note = Description of Artificial Sequence: Synthetic oligonucleotide
  source 1..20: mol_type = other RNA
tcaaggaagatggcatttct

SEQ ID NO: 314 - RNA, 20 nt, synthetic construct
  misc_feature 1..20: note = Description of Artificial Sequence: Synthetic oligonucleotide
  source 1..20: mol_type = other RNA
tcaaggaagatggcatttct

SEQ ID NO: 315 - RNA, 20 nt, synthetic construct
  misc_feature 1..20: note = Description of Artificial Sequence: Synthetic oligonucleotide
  source 1..20: mol_type = other RNA
tcaaggaagatggcatttct

SEQ ID NO: 316 - RNA, 20 nt, synthetic construct
  misc_feature 1..20: note = Description of Artificial Sequence: Synthetic oligonucleotide
  source 1..20: mol_type = other RNA
tcaaggaagatggcatttct

SEQ ID NO: 317 - RNA, 20 nt, synthetic construct
  misc_feature 1..20: note = Description of Artificial Sequence: Synthetic oligonucleotide
  source 1..20: mol_type = other RNA
tcaaggaagatggcatttct

SEQ ID NO: 318 - RNA, 20 nt, synthetic construct
  misc_feature 1..20: note = Description of Artificial Sequence: Synthetic oligonucleotide
  source 1..20: mol_type = other RNA
tcaaggaagatggcatttct

SEQ ID NO: 319 - RNA, 20 nt, synthetic construct
  misc_feature 1..20: note = Description of Artificial Sequence: Synthetic oligonucleotide
  source 1..20: mol_type = other RNA
tcaaggaagatggcatttct

SEQ ID NO: 320 - RNA, 20 nt, synthetic construct
  misc_feature 1..20: note = Description of Artificial Sequence: Synthetic oligonucleotide
  source 1..20: mol_type = other RNA
tcaaggaagatggcatttct

SEQ ID NO: 321 - RNA, 20 nt, synthetic construct
  misc_feature 1..20: note = Description of Artificial Sequence: Synthetic oligonucleotide
  source 1..20: mol_type = other RNA
tcaaggaagatggcatttct

SEQ ID NO: 322 - RNA, 20 nt, synthetic construct
  misc_feature 1..20: note = Description of Artificial Sequence: Synthetic oligonucleotide
  source 1..20: mol_type = other RNA
tcaaggaagatggcatttct

SEQ ID NO: 323 - RNA, 20 nt, synthetic construct
  misc_feature 1..20: note = Description of Artificial Sequence: Synthetic oligonucleotide
  source 1..20: mol_type = other RNA
tcaaggaagatggcatttct

SEQ ID NO: 324 - RNA, 20 nt, synthetic construct
  misc_feature 1..20: note = Description of Artificial Sequence: Synthetic oligonucleotide
  source 1..20: mol_type = other RNA
tcaaggaagatggcatttct

SEQ ID NO: 325 - RNA, 20 nt, synthetic construct
  misc_feature 1..20: note = Description of Artificial Sequence: Synthetic oligonucleotide
  source 1..20: mol_type = other RNA
tcaaggaagatggcatttct

SEQ ID NO: 326 - RNA, 20 nt, synthetic construct
  misc_feature 1..20: note = Description of Artificial Sequence: Synthetic oligonucleotide
  source 1..20: mol_type = other RNA
tcaaggaagatggcatttct

SEQ ID NO: 327 - RNA, 20 nt, synthetic construct
  misc_feature 1..20: note = Description of Artificial Sequence: Synthetic oligonucleotide
  source 1..20: mol_type = other RNA
tcaaggaagatggcatttct

SEQ ID NO: 328 - RNA, 20 nt, synthetic construct
  misc_feature 1..20: note = Description of Artificial Sequence: Synthetic oligonucleotide
  source 1..20: mol_type = other RNA
tcaaggaagatggcatttct

SEQ ID NO: 329 - RNA, 20 nt, synthetic construct
  misc_feature 1..20: note = Description of Artificial Sequence: Synthetic oligonucleotide
  source 1..20: mol_type = other RNA
tcaaggaagatggcatttct

SEQ ID NO: 330 - RNA, 20 nt, synthetic construct
  misc_feature 1..20: note = Description of Artificial Sequence: Synthetic oligonucleotide
  source 1..20: mol_type = other RNA
tcaaggaagatggcatttct

SEQ ID NO: 331 - RNA, 20 nt, synthetic construct
  misc_feature 1..20: note = Description of Artificial Sequence: Synthetic oligonucleotide
  source 1..20: mol_type = other RNA
tcaaggaagatggcatttct

SEQ ID NO: 332 - RNA, 20 nt, synthetic construct
  misc_feature 1..20: note = Description of Artificial Sequence: Synthetic oligonucleotide
  source 1..20: mol_type = other RNA
tcaaggaagatggcatttct

SEQ ID NO: 333 - RNA, 20 nt, synthetic construct
  misc_feature 1..20: note = Description of Artificial Sequence: Synthetic oligonucleotide
  source 1..20: mol_type = other RNA
tcaaggaagatggcatttct

SEQ ID NO: 334 - RNA, 20 nt, synthetic construct
  misc_feature 1..20: note = Description of Artificial Sequence: Synthetic oligonucleotide
  source 1..20: mol_type = other RNA
tcaaggaagatggcatttct

SEQ ID NO: 335 - RNA, 20 nt, synthetic construct
  misc_feature 1..20: note = Description of Artificial Sequence: Synthetic oligonucleotide
  source 1..20: mol_type = other RNA
tcaaggaagatggcatttct

SEQ ID NO: 336 - RNA, 20 nt, synthetic construct
  misc_feature 1..20: note = Description of Artificial Sequence: Synthetic oligonucleotide
  source 1..20: mol_type = other RNA
tcaaggaagatggcatttct

SEQ ID NO: 337 - RNA, 20 nt, synthetic construct
  misc_feature 1..20: note = Description of Artificial Sequence: Synthetic oligonucleotide
  source 1..20: mol_type = other RNA
tcaaggaagatggcatttct

SEQ ID NO: 338 - RNA, 20 nt, synthetic construct
  misc_feature 1..20: note = Description of Artificial Sequence: Synthetic oligonucleotide
  source 1..20: mol_type = other RNA
tcaaggaagatggcatttct

SEQ ID NO: 339 - RNA, 20 nt, synthetic construct
  misc_feature 1..20: note = Description of Artificial Sequence: Synthetic oligonucleotide
  source 1..20: mol_type = other RNA
tcaaggaagatggcatttct

SEQ ID NO: 340 - RNA, 20 nt, synthetic construct
  misc_feature 1..20: note = Description of Artificial Sequence: Synthetic oligonucleotide
  source 1..20: mol_type = other RNA
tcaaggaagatggcatttct

SEQ ID NO: 341 - RNA, 20 nt, synthetic construct
  misc_feature 1..20: note = Description of Artificial Sequence: Synthetic oligonucleotide
  source 1..20: mol_type = other RNA
tcaaggaagatggcatttct

SEQ ID NO: 342 - RNA, 20 nt, synthetic construct
  misc_feature 1..20: note = Description of Artificial Sequence: Synthetic oligonucleotide
  source 1..20: mol_type = other RNA
tcaaggaagatggcatttct

SEQ ID NO: 343 - RNA, 20 nt, synthetic construct
  misc_feature 1..20: note = Description of Artificial Sequence: Synthetic oligonucleotide
  source 1..20: mol_type = other RNA
tcaaggaagatggcatttct

SEQ ID NO: 344 - RNA, 20 nt, synthetic construct
  misc_feature 1..20: note = Description of Artificial Sequence: Synthetic oligonucleotide
  source 1..20: mol_type = other RNA
tcaaggaagatggcatttct

SEQ ID NO: 345 - RNA, 20 nt, synthetic construct
  misc_feature 1..20: note = Description of Artificial Sequence: Synthetic oligonucleotide
  source 1..20: mol_type = other RNA
tcaaggaagatggcatttct

SEQ ID NO: 346 - RNA, 20 nt, synthetic construct
  misc_feature 1..20: note = Description of Artificial Sequence: Synthetic oligonucleotide
  source 1..20: mol_type = other RNA
tcaaggaagatggcatttct

SEQ ID NO: 347 - RNA, 20 nt, synthetic construct
  misc_feature 1..20: note = Description of Artificial Sequence: Synthetic oligonucleotide
  source 1..20: mol_type = other RNA
tcaaggaagatggcatttct

SEQ ID NO: 348 - RNA, 20 nt, synthetic construct
  misc_feature 1..20: note = Description of Artificial Sequence: Synthetic oligonucleotide
  source 1..20: mol_type = other RNA
tcaaggaagatggcatttct

SEQ ID NO: 349 - RNA, 20 nt, synthetic construct
  misc_feature 1..20: note = Description of Artificial Sequence: Synthetic oligonucleotide
  source 1..20: mol_type = other RNA
tcaaggaagatggcatttct

SEQ ID NO: 350 - RNA, 20 nt, synthetic construct
  misc_feature 1..20: note = Description of Artificial Sequence: Synthetic oligonucleotide
  source 1..20: mol_type = other RNA
tcaaggaagatggcatttct

SEQ ID NO: 351 - RNA, 20 nt, synthetic construct
  misc_feature 1..20: note = Description of Artificial Sequence: Synthetic oligonucleotide
  source 1..20: mol_type = other RNA
tcaaggaagatggcatttct

SEQ ID NO: 352 - RNA, 20 nt, synthetic construct
  misc_feature 1..20: note = Description of Artificial Sequence: Synthetic oligonucleotide
  source 1..20: mol_type = other RNA
tcaaggaagatggcatttct

SEQ ID NO: 353 - RNA, 20 nt, synthetic construct
  misc_feature 1..20: note = Description of Artificial Sequence: Synthetic oligonucleotide
  source 1..20: mol_type = other RNA
tcaaggaagatggcatttct

SEQ ID NO: 354 - RNA, 20 nt, synthetic construct
  misc_feature 1..20: note = Description of Artificial Sequence: Synthetic oligonucleotide
  source 1..20: mol_type = other RNA
tcaaggaagatggcatttct

SEQ ID NO: 355 - RNA, 20 nt, synthetic construct
  misc_feature 1..20: note = Description of Artificial Sequence: Synthetic oligonucleotide
  source 1..20: mol_type = other RNA
tcaaggaagatggcatttct

SEQ ID NO: 356 - RNA, 20 nt, synthetic construct
  misc_feature 1..20: note = Description of Artificial Sequence: Synthetic oligonucleotide
  source 1..20: mol_type = other RNA
tcaaggaagatggcatttct

SEQ ID NO: 357 - RNA, 20 nt, synthetic construct
  misc_feature 1..20: note = Description of Artificial Sequence: Synthetic oligonucleotide
  source 1..20: mol_type = other RNA
tcaaggaagatggcatttct

SEQ ID NO: 358 - RNA, 20 nt, synthetic construct
  misc_feature 1..20: note = Description of Artificial Sequence: Synthetic oligonucleotide
  source 1..20: mol_type = other RNA
tcaaggaagatggcatttct

SEQ ID NO: 359 - RNA, 20 nt, synthetic construct
  misc_feature 1..20: note = Description of Artificial Sequence: Synthetic oligonucleotide
  source 1..20: mol_type = other RNA
tcaaggaagatggcatttct

SEQ ID NO: 360 - RNA, 20 nt, synthetic construct
  misc_feature 1..20: note = Description of Artificial Sequence: Synthetic oligonucleotide
  source 1..20: mol_type = other RNA
tcaaggaagatggcatttct

SEQ ID NO: 361 - RNA, 20 nt, synthetic construct
  misc_feature 1..20: note = Description of Artificial Sequence: Synthetic oligonucleotide
  source 1..20: mol_type = other RNA
tcaaggaagatggcatttct

SEQ ID NO: 362 - RNA, 20 nt, synthetic construct
  misc_feature 1..20: note = Description of Artificial Sequence: Synthetic oligonucleotide
  source 1..20: mol_type = other RNA
tcaaggaagatggcatttct

SEQ ID NO: 363 - RNA, 20 nt, synthetic construct
  misc_feature 1..20: note = Description of Artificial Sequence: Synthetic oligonucleotide
  source 1..20: mol_type = other RNA
tcaaggaagatggcatttct

SEQ ID NO: 364 - RNA, 20 nt, synthetic construct
  misc_feature 1..20: note = Description of Artificial Sequence: Synthetic oligonucleotide
  source 1..20: mol_type = other RNA
tcaaggaagatggcatttct

SEQ ID NO: 365 - RNA, 20 nt, synthetic construct
  misc_feature 1..20: note = Description of Artificial Sequence: Synthetic oligonucleotide
  source 1..20: mol_type = other RNA
tcaaggaagatggcatttct

SEQ ID NO: 366 - RNA, 20 nt, synthetic construct
  misc_feature 1..20: note = Description of Artificial Sequence: Synthetic oligonucleotide
  source 1..20: mol_type = other RNA
tcaaggaagatggcatttct

SEQ ID NO: 367 - RNA, 20 nt, synthetic construct
  misc_feature 1..20: note = Description of Artificial Sequence: Synthetic oligonucleotide
  source 1..20: mol_type = other RNA
tcaaggaagatggcatttct

SEQ ID NO: 368 - RNA, 20 nt, synthetic construct
  misc_feature 1..20: note = Description of Artificial Sequence: Synthetic oligonucleotide
  source 1..20: mol_type = other RNA
tcaaggaagatggcatttct

SEQ ID NO: 369 - RNA, 20 nt, synthetic construct
  misc_feature 1..20: note = Description of Artificial Sequence: Synthetic oligonucleotide
  source 1..20: mol_type = other RNA
tcaaggaagatggcatttct

SEQ ID NO: 370 - RNA, 20 nt, synthetic construct
  misc_feature 1..20: note = Description of Artificial Sequence: Synthetic oligonucleotide
  source 1..20: mol_type = other RNA
tcaaggaagatggcatttct

SEQ ID NO: 371 - RNA, 20 nt, synthetic construct
  misc_feature 1..20: note = Description of Artificial Sequence: Synthetic oligonucleotide
  source 1..20: mol_type = other RNA
tcaaggaagatggcatttct

SEQ ID NO: 372 - RNA, 20 nt, synthetic construct
  misc_feature 1..20: note = Description of Artificial Sequence: Synthetic oligonucleotide
  source 1..20: mol_type = other RNA
tcaaggaagatggcatttct

SEQ ID NO: 373 - RNA, 20 nt, synthetic construct
  misc_feature 1..20: note = Description of Artificial Sequence: Synthetic oligonucleotide
  source 1..20: mol_type = other RNA
tcaaggaagatggcatttct

SEQ ID NO: 374 - RNA, 20 nt, synthetic construct
  misc_feature 1..20: note = Description of Artificial Sequence: Synthetic oligonucleotide
  source 1..20: mol_type = other RNA
tcaaggaagatggcatttct

SEQ ID NO: 375 - RNA, 20 nt, synthetic construct
  misc_feature 1..20: note = Description of Artificial Sequence: Synthetic oligonucleotide
  source 1..20: mol_type = other RNA
tcaaggaagatggcatttct

SEQ ID NO: 376 - RNA, 20 nt, synthetic construct
  misc_feature 1..20: note = Description of Artificial Sequence: Synthetic oligonucleotide
  source 1..20: mol_type = other RNA
tcaaggaagatggcatttct

SEQ ID NO: 377 - RNA, 20 nt, synthetic construct
  misc_feature 1..20: note = Description of Artificial Sequence: Synthetic oligonucleotide
  source 1..20: mol_type = other RNA
tcaaggaagatggcatttct

SEQ ID NO: 378 - RNA, 20 nt, synthetic construct
  misc_feature 1..20: note = Description of Artificial Sequence: Synthetic oligonucleotide
  source 1..20: mol_type = other RNA
tcaaggaagatggcatttct

SEQ ID NO: 379 - RNA, 20 nt, synthetic construct
  misc_feature 1..20: note = Description of Artificial Sequence: Synthetic oligonucleotide
  source 1..20: mol_type = other RNA
tcaaggaagatggcatttct

SEQ ID NO: 380 - RNA, 20 nt, synthetic construct
  misc_feature 1..20: note = Description of Artificial Sequence: Synthetic oligonucleotide
  source 1..20: mol_type = other RNA
tcaaggaagatggcatttct

SEQ ID NO: 381 - RNA, 20 nt, synthetic construct
  misc_feature 1..20: note = Description of Artificial Sequence: Synthetic oligonucleotide
  source 1..20: mol_type = other RNA
tcaaggaagatggcatttct

SEQ ID NO: 382 - RNA, 20 nt, synthetic construct
  misc_feature 1..20: note = Description of Artificial Sequence: Synthetic oligonucleotide
  source 1..20: mol_type = other RNA
tcaaggaagatggcatttct

SEQ ID NO: 383 - RNA, 20 nt, synthetic construct
  misc_feature 1..20: note = Description of Artificial Sequence: Synthetic oligonucleotide
  source 1..20: mol_type = other RNA
tcaaggaagatggcatttct

SEQ ID NO: 384 - RNA, 20 nt, synthetic construct
  misc_feature 1..20: note = Description of Artificial Sequence: Synthetic oligonucleotide
  source 1..20: mol_type = other RNA
tcaaggaagatggcatttct

SEQ ID NO: 385 - RNA, 20 nt, synthetic construct
  misc_feature 1..20: note = Description of Artificial Sequence: Synthetic oligonucleotide
  source 1..20: mol_type = other RNA
tcaaggaagatggcatttct

SEQ ID NO: 386 - RNA, 20 nt, synthetic construct
  misc_feature 1..20: note = Description of Artificial Sequence: Synthetic oligonucleotide
  source 1..20: mol_type = other RNA
tcaaggaagatggcatttct

SEQ ID NO: 387 - RNA, 20 nt, synthetic construct
  misc_feature 1..20: note = Description of Artificial Sequence: Synthetic oligonucleotide
  source 1..20: mol_type = other RNA
tcaaggaagatggcatttct

SEQ ID NO: 388 - RNA, 20 nt, synthetic construct
  misc_feature 1..20: note = Description of Artificial Sequence: Synthetic oligonucleotide
  source 1..20: mol_type = other RNA
tcaaggaagatggcatttct

SEQ ID NO: 389 - RNA, 20 nt, synthetic construct
  misc_feature 1..20: note = Description of Artificial Sequence: Synthetic oligonucleotide
  source 1..20: mol_type = other RNA
tcaaggaagatggcatttct

SEQ ID NO: 390 - RNA, 20 nt, synthetic construct
  misc_feature 1..20: note = Description of Artificial Sequence: Synthetic oligonucleotide
  source 1..20: mol_type = other RNA
tcaaggaagatggcatttct

SEQ ID NO: 391 - RNA, 20 nt, synthetic construct
  misc_feature 1..20: note = Description of Artificial Sequence: Synthetic oligonucleotide
  source 1..20: mol_type = other RNA
tcaaggaagatggcatttct

SEQ ID NO: 392 - RNA, 20 nt, synthetic construct
  misc_feature 1..20: note = Description of Artificial Sequence: Synthetic oligonucleotide
  source 1..20: mol_type = other RNA
tcaaggaagatggcatttct

SEQ ID NO: 393 - RNA, 20 nt, synthetic construct
  misc_feature 1..20: note = Description of Artificial Sequence: Synthetic oligonucleotide
  source 1..20: mol_type = other RNA
tcaaggaagatggcatttct

SEQ ID NO: 394 - RNA, 20 nt, synthetic construct
  misc_feature 1..20: note = Description of Artificial Sequence: Synthetic oligonucleotide
  source 1..20: mol_type = other RNA
tcaaggaagatggcatttct

SEQ ID NO: 395 - RNA, 20 nt, synthetic construct
  misc_feature 1..20: note = Description of Artificial Sequence: Synthetic oligonucleotide
  source 1..20: mol_type = other RNA
tcaaggaagatggcatttct

SEQ ID NO: 396 - RNA, 20 nt, synthetic construct
  misc_feature 1..20: note = Description of Artificial Sequence: Synthetic oligonucleotide
  source 1..20: mol_type = other RNA
tcaaggaagatggcatttct

SEQ ID NO: 397 - RNA, 20 nt, synthetic construct
  misc_feature 1..20: note = Description of Artificial Sequence: Synthetic oligonucleotide
  source 1..20: mol_type = other RNA
tcaaggaagatggcatttct

SEQ ID NO: 398 - RNA, 20 nt, synthetic construct
  misc_feature 1..20: note = Description of Artificial Sequence: Synthetic oligonucleotide
  source 1..20: mol_type = other RNA
tcaaggaagatggcatttct

SEQ ID NO: 399 - RNA, 20 nt, synthetic construct
  misc_feature 1..20: note = Description of Artificial Sequence: Synthetic oligonucleotide
  source 1..20: mol_type = other RNA
tcaaggaagatggcatttct

SEQ ID NO: 400 - RNA, 20 nt, synthetic construct
  misc_feature 1..20: note = Description of Artificial Sequence: Synthetic oligonucleotide
  source 1..20: mol_type = other RNA
tcaaggaagatggcatttct

SEQ ID NO: 401 - RNA, 20 nt, synthetic construct
  misc_feature 1..20: note = Description of Artificial Sequence: Synthetic oligonucleotide
  source 1..20: mol_type = other RNA
tcaaggaagatggcatttct

SEQ ID NO: 402 - RNA, 20 nt, synthetic construct
  misc_feature 1..20: note = Description of Artificial Sequence: Synthetic oligonucleotide
  source 1..20: mol_type = other RNA
tcaaggaagatggcatttct

SEQ ID NO: 403 - RNA, 20 nt, synthetic construct
  misc_feature 1..20: note = Description of Artificial Sequence: Synthetic oligonucleotide
  source 1..20: mol_type = other RNA
tcaaggaagatggcatttct

SEQ ID NO: 404 - RNA, 20 nt, synthetic construct
  misc_feature 1..20: note = Description of Artificial Sequence: Synthetic oligonucleotide
  source 1..20: mol_type = other RNA
tcaaggaagatggcatttct

SEQ ID NO: 405 - RNA, 20 nt, synthetic construct
  misc_feature 1..20: note = Description of Artificial Sequence: Synthetic oligonucleotide
  source 1..20: mol_type = other RNA
tcaaggaagatggcatttct

SEQ ID NO: 406 - RNA, 20 nt, synthetic construct
  misc_feature 1..20: note = Description of Artificial Sequence: Synthetic oligonucleotide
  source 1..20: mol_type = other RNA
tcaaggaagatggcatttct

SEQ ID NO: 407 - RNA, 20 nt, synthetic construct
  misc_feature 1..20: note = Description of Artificial Sequence: Synthetic oligonucleotide
  source 1..20: mol_type = other RNA
tcaaggaagatggcatttct

SEQ ID NO: 408 - RNA, 20 nt, synthetic construct
  misc_feature 1..20: note = Description of Artificial Sequence: Synthetic oligonucleotide
  source 1..20: mol_type = other RNA
tcaaggaagatggcatttct

SEQ ID NO: 409 - RNA, 20 nt, synthetic construct
  misc_feature 1..20: note = Description of Artificial Sequence: Synthetic oligonucleotide
  source 1..20: mol_type = other RNA
tcaaggaagatggcatttct

SEQ ID NO: 410 - RNA, 20 nt, synthetic construct
  misc_feature 1..20: note = Description of Artificial Sequence: Synthetic oligonucleotide
  source 1..20: mol_type = other RNA
tcaaggaagatggcatttct

SEQ ID NO: 411 - DNA, 20 bp, synthetic construct
  misc_feature 1..20: note = Synthetic oligonucleotide
  modified_base 1: mod_base = OTHER; note = uracil
  modified_base 16..18: mod_base = OTHER; note = uracil
  modified_base 20: mod_base = OTHER; note = uracil
  source 1..20: mol_type = other DNA
tcaaggaagatggcatttct

SEQ ID NO: 412 - DNA, 20 bp, synthetic construct
  misc_feature 1..20: note = Synthetic oligonucleotide
  modified_base 1: mod_base = OTHER; note = uracil
  modified_base 16..18: mod_base = OTHER; note = uracil
  modified_base 20: mod_base = OTHER; note = uracil
  source 1..20: mol_type = other DNA
tcaaggaagatggcatttct

SEQ ID NO: 413 - DNA, 20 bp, synthetic construct
  misc_feature 1..20: note = Synthetic oligonucleotide
  modified_base 1: mod_base = OTHER; note = uracil
  modified_base 16..18: mod_base = OTHER; note = uracil
  modified_base 20: mod_base = OTHER; note = uracil
  source 1..20: mol_type = other DNA
tcaaggaagatggcatttct

SEQ ID NO: 414 - DNA, 20 bp, synthetic construct
  misc_feature 1..20: note = Synthetic oligonucleotide
  modified_base 1: mod_base = OTHER; note = uracil
  modified_base 16..18: mod_base = OTHER; note = uracil
  modified_base 20: mod_base = OTHER; note = uracil
  source 1..20: mol_type = other DNA
tcaaggaagatggcatttct

SEQ ID NO: 415 - DNA, 20 bp, synthetic construct
  misc_feature 1..20: note = Synthetic oligonucleotide
  modified_base 1: mod_base = OTHER; note = uracil
  modified_base 16..18: mod_base = OTHER; note = uracil
  modified_base 20: mod_base = OTHER; note = uracil
  source 1..20: mol_type = other DNA
tcaaggaagatggcatttct

SEQ ID NO: 416 - DNA, 20 bp, synthetic construct
  misc_feature 1..20: note = Synthetic oligonucleotide
  modified_base 1: mod_base = OTHER; note = uracil
  modified_base 16..18: mod_base = OTHER; note = uracil
  modified_base 20: mod_base = OTHER; note = uracil
  source 1..20: mol_type = other DNA
tcaaggaagatggcatttct

SEQ ID NO: 417 - DNA, 20 bp, synthetic construct
  misc_feature 1..20: note = Synthetic oligonucleotide
  modified_base 1: mod_base = OTHER; note = uracil
  modified_base 16..18: mod_base = OTHER; note = uracil
  modified_base 20: mod_base = OTHER; note = uracil
  source 1..20: mol_type = other DNA
tcaaggaagatggcatttct

SEQ ID NO: 418 - RNA, 20 nt, synthetic construct
  misc_feature 1..20: note = Description of Artificial Sequence: Synthetic oligonucleotide
  source 1..20: mol_type = other RNA
tcaaggaagatggcatttct

SEQ ID NO: 419 - RNA, 20 nt, synthetic construct
  misc_feature 1..20: note = Description of Artificial Sequence: Synthetic oligonucleotide
  source 1..20: mol_type = other RNA
tcaaggaagatggcatttct

SEQ ID NO: 420 - RNA, 20 nt, synthetic construct
  misc_feature 1..20: note = Description of Artificial Sequence: Synthetic oligonucleotide
  source 1..20: mol_type = other RNA
tcaaggaagatggcatttct

SEQ ID NO: 421 - RNA, 20 nt, synthetic construct
  misc_feature 1..20: note = Description of Artificial Sequence: Synthetic oligonucleotide
  source 1..20: mol_type = other RNA
tcaaggaagatggcatttct

SEQ ID NO: 422 - RNA, 20 nt, synthetic construct
  misc_feature 1..20: note = Description of Artificial Sequence: Synthetic oligonucleotide
  source 1..20: mol_type = other RNA
tcaaggaagatggcatttct

SEQ ID NO: 423 - RNA, 20 nt, synthetic construct
  misc_feature 1..20: note = Description of Artificial Sequence: Synthetic oligonucleotide
  source 1..20: mol_type = other RNA
tcaaggaagatggcatttct

SEQ ID NO: 424 - RNA, 20 nt, synthetic construct
  misc_feature 1..20: note = Description of Artificial Sequence: Synthetic oligonucleotide
  source 1..20: mol_type = other RNA
tcaaggaagatggcatttct

SEQ ID NO: 425 - RNA, 20 nt, synthetic construct
  misc_feature 1..20: note = Description of Artificial Sequence: Synthetic oligonucleotide
  source 1..20: mol_type = other RNA
tcaaggaagatggcatttct

SEQ ID NO: 426 - RNA, 20 nt, synthetic construct
  misc_feature 1..20: note = Description of Artificial Sequence: Synthetic oligonucleotide
  source 1..20: mol_type = other RNA
tcaaggaagatggcatttct

SEQ ID NO: 427 - RNA, 20 nt, synthetic construct
  misc_feature 1..20: note = Description of Artificial Sequence: Synthetic oligonucleotide
  source 1..20: mol_type = other RNA
tcaaggaagatggcatttct

SEQ ID NO: 428 - RNA, 20 nt, synthetic construct
  misc_feature 1..20: note = Description of Artificial Sequence: Synthetic oligonucleotide
  source 1..20: mol_type = other RNA
tcaaggaagatggcatttct

SEQ ID NO: 429 - RNA, 20 nt, synthetic construct
  misc_feature 1..20: note = Description of Artificial Sequence: Synthetic oligonucleotide
  source 1..20: mol_type = other RNA
tcaaggaagatggcatttct

SEQ ID NO: 430 - RNA, 20 nt, synthetic construct
  misc_feature 1..20: note = Description of Artificial Sequence: Synthetic oligonucleotide
  source 1..20: mol_type = other RNA
tcaaggaagatggcatttct

SEQ ID NO: 431 - RNA, 20 nt, synthetic construct
  misc_feature 1..20: note = Description of Artificial Sequence: Synthetic oligonucleotide
  source 1..20: mol_type = other RNA
tcaaggaagatggcatttct

SEQ ID NO: 432 - RNA, 20 nt, synthetic construct
  misc_feature 1..20: note = Description of Artificial Sequence: Synthetic oligonucleotide
  source 1..20: mol_type = other RNA
tcaaggaagatggcatttct

SEQ ID NO: 433 - RNA, 20 nt, synthetic construct
  misc_feature 1..20: note = Description of Artificial Sequence: Synthetic oligonucleotide
  source 1..20: mol_type = other RNA
tcaaggaagatggcatttct

SEQ ID NO: 434 - RNA, 20 nt, synthetic construct
  misc_feature 1..20: note = Description of Artificial Sequence: Synthetic oligonucleotide
  source 1..20: mol_type = other RNA
tcaaggaagatggcatttct

SEQ ID NO: 435 - RNA, 20 nt, synthetic construct
  misc_feature 1..20: note = Description of Artificial Sequence: Synthetic oligonucleotide
  source 1..20: mol_type = other RNA
tcaaggaagatggcatttct

SEQ ID NO: 436 - RNA, 20 nt, synthetic construct
  misc_feature 1..20: note = Description of Artificial Sequence: Synthetic oligonucleotide
  source 1..20: mol_type = other RNA
tcaaggaagatggcatttct

SEQ ID NO: 437 - RNA, 20 nt, synthetic construct
  misc_feature 1..20: note = Description of Artificial Sequence: Synthetic oligonucleotide
  source 1..20: mol_type = other RNA
tcaaggaagatggcatttct

SEQ ID NO: 438 - RNA, 20 nt, synthetic construct
  misc_feature 1..20: note = Description of Artificial Sequence: Synthetic oligonucleotide
  source 1..20: mol_type = other RNA
tcaaggaagatggcatttct

SEQ ID NO: 439 - RNA, 20 nt, synthetic construct
  misc_feature 1..20: note = Description of Artificial Sequence: Synthetic oligonucleotide
  source 1..20: mol_type = other RNA
tcaaggaagatggcatttct

SEQ ID NO: 440 - RNA, 20 nt, synthetic construct
  misc_feature 1..20: note = Description of Artificial Sequence: Synthetic oligonucleotide
  source 1..20: mol_type = other RNA
tcaaggaagatggcatttct

SEQ ID NO: 441 - RNA, 20 nt, synthetic construct
  misc_feature 1..20: note = Description of Artificial Sequence: Synthetic oligonucleotide
  source 1..20: mol_type = other RNA
tcaaggaagatggcatttct

SEQ ID NO: 442 - RNA, 20 nt, synthetic construct
  misc_feature 1..20: note = Description of Artificial Sequence: Synthetic oligonucleotide
  source 1..20: mol_type = other RNA
tcaaggaagatggcatttct

SEQ ID NO: 443 - RNA, 20 nt, synthetic construct
  misc_feature 1..20: note = Description of Artificial Sequence: Synthetic oligonucleotide
  source 1..20: mol_type = other RNA
tcaaggaagatggcatttct

SEQ ID NO: 444 - RNA, 20 nt, synthetic construct
  misc_feature 1..20: note = Description of Artificial Sequence: Synthetic oligonucleotide
  source 1..20: mol_type = other RNA
tcaaggaagatggcatttct

SEQ ID NO: 445 - RNA, 20 nt, synthetic construct
  misc_feature 1..20: note = Description of Artificial Sequence: Synthetic oligonucleotide
  source 1..20: mol_type = other RNA
tcaaggaagatggcatttct

SEQ ID NO: 446 - RNA, 20 nt, synthetic construct
  misc_feature 1..20: note = Description of Artificial Sequence: Synthetic oligonucleotide
  source 1..20: mol_type = other RNA
tcaaggaagatggcatttct

SEQ ID NO: 447 - RNA, 20 nt, synthetic construct
  misc_feature 1..20: note = Description of Artificial Sequence: Synthetic oligonucleotide
  source 1..20: mol_type = other RNA
tcaaggaagatggcatttct

SEQ ID NO: 448 - RNA, 20 nt, synthetic construct
  misc_feature 1..20: note = Description of Artificial Sequence: Synthetic oligonucleotide
  source 1..20: mol_type = other RNA
tcaaggaagatggcatttct

SEQ ID NO: 449 - RNA, 20 nt, synthetic construct
  misc_feature 1..20: note = Description of Artificial Sequence: Synthetic oligonucleotide
  source 1..20: mol_type = other RNA
tcaaggaagatggcatttct

SEQ ID NO: 450 - RNA, 20 nt, synthetic construct
  misc_feature 1..20: note = Description of Artificial Sequence: Synthetic oligonucleotide
  source 1..20: mol_type = other RNA
tcaaggaagatggcatttct

SEQ ID NO: 451 - RNA, 20 nt, synthetic construct
  misc_feature 1..20: note = Description of Artificial Sequence: Synthetic oligonucleotide
  source 1..20: mol_type = other RNA
tcaaggaagatggcatttct

SEQ ID NO: 452 - RNA, 20 nt, synthetic construct
  misc_feature 1..20: note = Description of Artificial Sequence: Synthetic oligonucleotide
  source 1..20: mol_type = other RNA
tcaaggaagatggcatttct

SEQ ID NO: 453 - RNA, 20 nt, synthetic construct
  misc_feature 1..20: note = Description of Artificial Sequence: Synthetic oligonucleotide
  source 1..20: mol_type = other RNA
tcaaggaagatggcatttct

SEQ ID NO: 454 - RNA, 20 nt, synthetic construct
  misc_feature 1..20: note = Description of Artificial Sequence: Synthetic oligonucleotide
  source 1..20: mol_type = other RNA
tcaaggaagatggcatttct

SEQ ID NO: 455 - RNA, 20 nt, synthetic construct
  misc_feature 1..20: note = Description of Artificial Sequence: Synthetic oligonucleotide
  source 1..20: mol_type = other RNA
tcaaggaagatggcatttct

SEQ ID NO: 456 - RNA, 20 nt, synthetic construct
  misc_feature 1..20: note = Description of Artificial Sequence: Synthetic oligonucleotide
  source 1..20: mol_type = other RNA
tcaaggaagatggcatttct

SEQ ID NO: 457 - RNA, 20 nt, synthetic construct
  misc_feature 1..20: note = Description of Artificial Sequence: Synthetic oligonucleotide
  source 1..20: mol_type = other RNA
tcaaggaagatggcatttct

SEQ ID NO: 458 - RNA, 20 nt, synthetic construct
  misc_feature 1..20: note = Description of Artificial Sequence: Synthetic oligonucleotide
  source 1..20: mol_type = other RNA
tcaaggaagatggcatttct

SEQ ID NO: 459 - RNA, 20 nt, synthetic construct
  misc_feature 1..20: note = Description of Artificial Sequence: Synthetic oligonucleotide
  source 1..20: mol_type = other RNA
tcaaggaagatggcatttct

SEQ ID NO: 460 - RNA, 20 nt, synthetic construct
  misc_feature 1..20: note = Description of Artificial Sequence: Synthetic oligonucleotide
  source 1..20: mol_type = other RNA
tcaaggaagatggcatttct

SEQ ID NO: 461 - RNA, 20 nt, synthetic construct
  misc_feature 1..20: note = Description of Artificial Sequence: Synthetic oligonucleotide
  source 1..20: mol_type = other RNA
tcaaggaagatggcatttct

SEQ ID NO: 462 - RNA, 20 nt, synthetic construct
  misc_feature 1..20: note = Description of Artificial Sequence: Synthetic oligonucleotide
  source 1..20: mol_type = other RNA
tcaaggaagatggcatttct

SEQ ID NO: 463 - RNA, 20 nt, synthetic construct
  misc_feature 1..20: note = Description of Artificial Sequence: Synthetic oligonucleotide
  source 1..20: mol_type = other RNA
tcaaggaagatggcatttct

SEQ ID NO: 464 - RNA, 20 nt, synthetic construct
  misc_feature 1..20: note = Description of Artificial Sequence: Synthetic oligonucleotide
  source 1..20: mol_type = other RNA
tcaaggaagatggcatttct

SEQ ID NO: 465 - RNA, 20 nt, synthetic construct
  misc_feature 1..20: note = Description of Artificial Sequence: Synthetic oligonucleotide
  source 1..20: mol_type = other RNA
tcaaggaagatggcatttct

SEQ ID NO: 466 - RNA, 20 nt, synthetic construct
  misc_feature 1..20: note = Description of Artificial Sequence: Synthetic oligonucleotide
  source 1..20: mol_type = other RNA
tcaaggaagatggcatttct

SEQ ID NO: 467 - RNA, 20 nt, synthetic construct
  misc_feature 1..20: note = Description of Artificial Sequence: Synthetic oligonucleotide
  source 1..20: mol_type = other RNA
tcaaggaagatggcatttct

SEQ ID NO: 468 - RNA, 20 nt, synthetic construct
  misc_feature 1..20: note = Description of Artificial Sequence: Synthetic oligonucleotide
  source 1..20: mol_type = other RNA
tcaaggaagatggcatttct

SEQ ID NO: 469 - RNA, 20 nt, synthetic construct
  misc_feature 1..20: note = Description of Artificial Sequence: Synthetic oligonucleotide
  source 1..20: mol_type = other RNA
tcaaggaagatggcatttct

SEQ ID NO: 470 - RNA, 20 nt, synthetic construct
  misc_feature 1..20: note = Description of Artificial Sequence: Synthetic oligonucleotide
  source 1..20: mol_type = other RNA
tcaaggaagatggcatttct

SEQ ID NO: 471 - RNA, 20 nt, synthetic construct
  misc_feature 1..20: note = Description of Artificial Sequence: Synthetic oligonucleotide
  source 1..20: mol_type = other RNA
tcaaggaagatggcatttct

SEQ ID NO: 472 - RNA, 20 nt, synthetic construct
  misc_feature 1..20: note = Description of Artificial Sequence: Synthetic oligonucleotide
  source 1..20: mol_type = other RNA
tcaaggaagatggcatttct

SEQ ID NO: 473 - RNA, 20 nt, synthetic construct
  misc_feature 1..20: note = Description of Artificial Sequence: Synthetic oligonucleotide
  source 1..20: mol_type = other RNA
tcaaggaagatggcatttct

SEQ ID NO: 474 - RNA, 20 nt, synthetic construct
  misc_feature 1..20: note = Description of Artificial Sequence: Synthetic oligonucleotide
  source 1..20: mol_type = other RNA
tcaaggaagatggcatttct

SEQ ID NO: 475 - RNA, 20 nt, synthetic construct
  misc_feature 1..20: note = Description of Artificial Sequence: Synthetic oligonucleotide
  source 1..20: mol_type = other RNA
tcaaggaagatggcatttct

SEQ ID NO: 476 - RNA, 20 nt, synthetic construct
  misc_feature 1..20: note = Description of Artificial Sequence: Synthetic oligonucleotide
  source 1..20: mol_type = other RNA
tcaaggaagatggcatttct

SEQ ID NO: 477 - RNA, 20 nt, synthetic construct
  misc_feature 1..20: note = Description of Artificial Sequence: Synthetic oligonucleotide
  source 1..20: mol_type = other RNA
tcaaggaagatggcatttct

SEQ ID NO: 478 - RNA, 20 nt, synthetic construct
  misc_feature 1..20: note = Description of Artificial Sequence: Synthetic oligonucleotide
  source 1..20: mol_type = other RNA
tcaaggaagatggcatttct

SEQ ID NO: 479 - RNA, 20 nt, synthetic construct
  misc_feature 1..20: note = Description of Artificial Sequence: Synthetic oligonucleotide
  source 1..20: mol_type = other RNA
tcaaggaagatggcatttct

SEQ ID NO: 480 - RNA, 20 nt, synthetic construct
  misc_feature 1..20: note = Description of Artificial Sequence: Synthetic oligonucleotide
  source 1..20: mol_type = other RNA
tcaaggaagatggcatttct

SEQ ID NO: 481 - RNA, 20 nt, synthetic construct
  misc_feature 1..20: note = Description of Artificial Sequence: Synthetic oligonucleotide
  source 1..20: mol_type = other RNA
tcaaggaagatggcatttct

SEQ ID NO: 482 - RNA, 20 nt, synthetic construct
  misc_feature 1..20: note = Description of Artificial Sequence: Synthetic oligonucleotide
  source 1..20: mol_type = other RNA
tcaaggaagatggcatttct

SEQ ID NO: 483 - RNA, 20 nt, synthetic construct
  misc_feature 1..20: note = Description of Artificial Sequence: Synthetic oligonucleotide
  source 1..20: mol_type = other RNA
tcaaggaagatggcatttct

SEQ ID NO: 484 - RNA, 20 nt, synthetic construct
  misc_feature 1..20: note = Description of Artificial Sequence: Synthetic oligonucleotide
  source 1..20: mol_type = other RNA
tcaaggaagatggcatttct

SEQ ID NO: 485 - RNA, 20 nt, synthetic construct
  misc_feature 1..20: note = Description of Artificial Sequence: Synthetic oligonucleotide
  source 1..20: mol_type = other RNA
tcaaggaagatggcatttct

SEQ ID NO: 486 - RNA, 20 nt, synthetic construct
  misc_feature 1..20: note = Description of Artificial Sequence: Synthetic oligonucleotide
  source 1..20: mol_type = other RNA
tcaaggaagatggcatttct

SEQ ID NO: 487 - RNA, 20 nt, synthetic construct
  misc_feature 1..20: note = Description of Artificial Sequence: Synthetic oligonucleotide
  source 1..20: mol_type = other RNA
tcaaggaagatggcatttct

SEQ ID NO: 488 - RNA, 20 nt, synthetic construct
  misc_feature 1..20: note = Description of Artificial Sequence: Synthetic oligonucleotide
  source 1..20: mol_type = other RNA
tcaaggaagatggcatttct

SEQ ID NO: 489 - RNA, 20 nt, synthetic construct
  misc_feature 1..20: note = Description of Artificial Sequence: Synthetic oligonucleotide
  source 1..20: mol_type = other RNA
tcaaggaagatggcatttct

SEQ ID NO: 490 - RNA, 20 nt, synthetic construct
  misc_feature 1..20: note = Description of Artificial Sequence: Synthetic oligonucleotide
  source 1..20: mol_type = other RNA
tcaaggaagatggcatttct

SEQ ID NO: 491 - RNA, 20 nt, synthetic construct
  misc_feature 1..20: note = Description of Artificial Sequence: Synthetic oligonucleotide
  source 1..20: mol_type = other RNA
tcaaggaagatggcatttct

SEQ ID NO: 492 - RNA, 20 nt, synthetic construct
  misc_feature 1..20: note = Description of Artificial Sequence: Synthetic oligonucleotide
  source 1..20: mol_type = other RNA
tcaaggaagatggcatttct

SEQ ID NO: 493 - RNA, 20 nt, synthetic construct
  misc_feature 1..20: note = Description of Artificial Sequence: Synthetic oligonucleotide
  source 1..20: mol_type = other RNA
tcaaggaagatggcatttct

SEQ ID NO: 494 - RNA, 20 nt, synthetic construct
  misc_feature 1..20: note = Description of Artificial Sequence: Synthetic oligonucleotide
  source 1..20: mol_type = other RNA
tcaaggaagatggcatttct

SEQ ID NO: 495 - RNA, 20 nt, synthetic construct
  misc_feature 1..20: note = Description of Artificial Sequence: Synthetic oligonucleotide
  source 1..20: mol_type = other RNA
tcaaggaagatggcatttct

SEQ ID NO: 496 - RNA, 20 nt, synthetic construct
  misc_feature 1..20: note = Description of Artificial Sequence: Synthetic oligonucleotide
  source 1..20: mol_type = other RNA
tcaaggaagatggcatttct

SEQ ID NO: 497 - RNA, 20 nt, synthetic construct
  misc_feature 1..20: note = Description of Artificial Sequence: Synthetic oligonucleotide
  source 1..20: mol_type = other RNA
tcaaggaagatggcatttct

SEQ ID NO: 498 - RNA, 20 nt, synthetic construct
  misc_feature 1..20: note = Description of Artificial Sequence: Synthetic oligonucleotide
  source 1..20: mol_type = other RNA
tcaaggaagatggcatttct

SEQ ID NO: 499 - RNA, 20 nt, synthetic construct
  misc_feature 1..20: note = Description of Artificial Sequence: Synthetic oligonucleotide
  source 1..20: mol_type = other RNA
tcaaggaagatggcatttct

SEQ ID NO: 500 - RNA, 20 nt, synthetic construct
  misc_feature 1..20: note = Description of Artificial Sequence: Synthetic oligonucleotide
  source 1..20: mol_type = other RNA
tcaaggaagatggcatttct

SEQ ID NO: 501 - RNA, 20 nt, synthetic construct
  misc_feature 1..20: note = Description of Artificial Sequence: Synthetic oligonucleotide
  source 1..20: mol_type = other RNA
tcaaggaagatggcatttct

SEQ ID NO: 502 - RNA, 20 nt, synthetic construct
  misc_feature 1..20: note = Description of Artificial Sequence: Synthetic oligonucleotide
  source 1..20: mol_type = other RNA
tcaaggaagatggcatttct

SEQ ID NO: 503 - RNA, 20 nt, synthetic construct
  misc_feature 1..20: note = Description of Artificial Sequence: Synthetic oligonucleotide
  source 1..20: mol_type = other RNA
tcaaggaagatggcatttct

SEQ ID NO: 504 - RNA, 20 nt, synthetic construct
  misc_feature 1..20: note = Description of Artificial Sequence: Synthetic oligonucleotide
  source 1..20: mol_type = other RNA
tcaaggaagatggcatttct

SEQ ID NO: 505 - RNA, 20 nt, synthetic construct
  misc_feature 1..20: note = Description of Artificial Sequence: Synthetic oligonucleotide
  source 1..20: mol_type = other RNA
tcaaggaagatggcatttct

SEQ ID NO: 506 - RNA, 20 nt, synthetic construct
  misc_feature 1..20: note = Description of Artificial Sequence: Synthetic oligonucleotide
  source 1..20: mol_type = other RNA
tcaaggaagatggcatttct

SEQ ID NO: 507 - RNA, 20 nt, synthetic construct
  misc_feature 1..20: note = Description of Artificial Sequence: Synthetic oligonucleotide
  source 1..20: mol_type = other RNA
tcaaggaagatggcatttct

SEQ ID NO: 508 - RNA, 20 nt, synthetic construct
  misc_feature 1..20: note = Description of Artificial Sequence: Synthetic oligonucleotide
  source 1..20: mol_type = other RNA
tcaaggaagatggcatttct

SEQ ID NO: 509 - RNA, 20 nt, synthetic construct
  misc_feature 1..20: note = Description of Artificial Sequence: Synthetic oligonucleotide
  source 1..20: mol_type = other RNA
tcaaggaagatggcatttct

SEQ ID NO: 510 - RNA, 20 nt, synthetic construct
  misc_feature 1..20: note = Description of Artificial Sequence: Synthetic oligonucleotide
  source 1..20: mol_type = other RNA
tcaaggaagatggcatttct

SEQ ID NO: 511 - RNA, 20 nt, synthetic construct
  misc_feature 1..20: note = Description of Artificial Sequence: Synthetic oligonucleotide
  source 1..20: mol_type = other RNA
tcaaggaagatggcatttct

SEQ ID NO: 512 - RNA, 20 nt, synthetic construct
  misc_feature 1..20: note = Description of Artificial Sequence: Synthetic oligonucleotide
  source 1..20: mol_type = other RNA
tcaaggaagatggcatttct

SEQ ID NO: 513 - RNA, 20 nt, synthetic construct
  misc_feature 1..20: note = Description of Artificial Sequence: Synthetic oligonucleotide
  source 1..20: mol_type = other RNA
tcaaggaagatggcatttct

SEQ ID NO: 514 - RNA, 20 nt, synthetic construct
  misc_feature 1..20: note = Description of Artificial Sequence: Synthetic oligonucleotide
  source 1..20: mol_type = other RNA
tcaaggaagatggcatttct

SEQ ID NO: 515 - RNA, 20 nt, synthetic construct
  misc_feature 1..20: note = Description of Artificial Sequence: Synthetic oligonucleotide
  source 1..20: mol_type = other RNA
tcaaggaagatggcatttct

SEQ ID NO: 516 - RNA, 20 nt, synthetic construct
  misc_feature 1..20: note = Description of Artificial Sequence: Synthetic oligonucleotide
  source 1..20: mol_type = other RNA
tcaaggaagatggcatttct

SEQ ID NO: 517 - RNA, 20 nt, synthetic construct
  misc_feature 1..20: note = Description of Artificial Sequence: Synthetic oligonucleotide
  source 1..20: mol_type = other RNA
tcaaggaagatggcatttct

SEQ ID NO: 518 - RNA, 20 nt, synthetic construct
  misc_feature 1..20: note = Description of Artificial Sequence: Synthetic oligonucleotide
  source 1..20: mol_type = other RNA
tcaaggaagatggcatttct

SEQ ID NO: 519 - RNA, 20 nt, synthetic construct
  misc_feature 1..20: note = Description of Artificial Sequence: Synthetic oligonucleotide
  source 1..20: mol_type = other RNA
tcaaggaagatggcatttct

SEQ ID NO: 520 - RNA, 20 nt, synthetic construct
  misc_feature 1..20: note = Description of Artificial Sequence: Synthetic oligonucleotide
  source 1..20: mol_type = other RNA
tcaaggaagatggcatttct

SEQ ID NO: 521 - RNA, 20 nt, synthetic construct
  misc_feature 1..20: note = Description of Artificial Sequence: Synthetic oligonucleotide
  source 1..20: mol_type = other RNA
tcaaggaagatggcatttct

SEQ ID NO: 522 - RNA, 20 nt, synthetic construct
  misc_feature 1..20: note = Description of Artificial Sequence: Synthetic oligonucleotide
  source 1..20: mol_type = other RNA
tcaaggaagatggcatttct

SEQ ID NO: 523 - RNA, 20 nt, synthetic construct
  misc_feature 1..20: note = Description of Artificial Sequence: Synthetic oligonucleotide
  source 1..20: mol_type = other RNA
tcaaggaagatggcatttct

SEQ ID NO: 524 - RNA, 20 nt, synthetic construct
  misc_feature 1..20: note = Description of Artificial Sequence: Synthetic oligonucleotide
  source 1..20: mol_type = other RNA
tcaaggaagatggcatttct

SEQ ID NO: 525 - RNA, 20 nt, synthetic construct
  misc_feature 1..20: note = Description of Artificial Sequence: Synthetic oligonucleotide
  source 1..20: mol_type = other RNA
tcaaggaagatggcatttct

SEQ ID NO: 526 - RNA, 20 nt, synthetic construct
  misc_feature 1..20: note = Description of Artificial Sequence: Synthetic oligonucleotide
  source 1..20: mol_type = other RNA
tcaaggaagatggcatttct

SEQ ID NO: 527 - RNA, 20 nt, synthetic construct
  misc_feature 1..20: note = Description of Artificial Sequence: Synthetic oligonucleotide
  source 1..20: mol_type = other RNA
tcaaggaagatggcatttct

SEQ ID NO: 528 - RNA, 20 nt, synthetic construct
  misc_feature 1..20: note = Description of Artificial Sequence: Synthetic oligonucleotide
  source 1..20: mol_type = other RNA
tcaaggaagatggcatttct

SEQ ID NO: 529 - RNA, 20 nt, synthetic construct
  misc_feature 1..20: note = Description of Artificial Sequence: Synthetic oligonucleotide
  source 1..20: mol_type = other RNA
tcaaggaagatggcatttct

SEQ ID NO: 530 - RNA, 20 nt, synthetic construct
  misc_feature 1..20: note = Description of Artificial Sequence: Synthetic oligonucleotide
  source 1..20: mol_type = other RNA
tcaaggaagatggcatttct

SEQ ID NO: 531 - RNA, 20 nt, synthetic construct
  misc_feature 1..20: note = Description of Artificial Sequence: Synthetic oligonucleotide
  source 1..20: mol_type = other RNA
tcaaggaagatggcatttct

SEQ ID NO: 532 - RNA, 20 nt, synthetic construct
  misc_feature 1..20: note = Description of Artificial Sequence: Synthetic oligonucleotide
  source 1..20: mol_type = other RNA
tcaaggaagatggcatttct

SEQ ID NO: 533 - RNA, 20 nt, synthetic construct
  misc_feature 1..20: note = Description of Artificial Sequence: Synthetic oligonucleotide
  source 1..20: mol_type = other RNA
tcaaggaagatggcatttct

SEQ ID NO: 534 - RNA, 20 nt, synthetic construct
  misc_feature 1..20: note = Description of Artificial Sequence: Synthetic oligonucleotide
  source 1..20: mol_type = other RNA
tcaaggaagatggcatttct

SEQ ID NO: 535 - RNA, 20 nt, synthetic construct
  misc_feature 1..20: note = Description of Artificial Sequence: Synthetic oligonucleotide
  source 1..20: mol_type = other RNA
tcaaggaagatggcatttct

SEQ ID NO: 536 - RNA, 20 nt, synthetic construct
  misc_feature 1..20: note = Description of Artificial Sequence: Synthetic oligonucleotide
  source 1..20: mol_type = other RNA
tcaaggaagatggcatttct

SEQ ID NO: 537 - RNA, 20 nt, synthetic construct
  misc_feature 1..20: note = Description of Artificial Sequence: Synthetic oligonucleotide
  source 1..20: mol_type = other RNA
tcaaggaagatggcatttct

SEQ ID NO: 538 - RNA, 20 nt, synthetic construct
  misc_feature 1..20: note = Description of Artificial Sequence: Synthetic oligonucleotide
  source 1..20: mol_type = other RNA
tcaaggaagatggcatttct

SEQ ID NO: 539 - RNA, 20 nt, synthetic construct
  misc_feature 1..20: note = Description of Artificial Sequence: Synthetic oligonucleotide
  source 1..20: mol_type = other RNA
tcaaggaagatggcatttct

SEQ ID NO: 540 - RNA, 20 nt, synthetic construct
  misc_feature 1..20: note = Description of Artificial Sequence: Synthetic oligonucleotide
  source 1..20: mol_type = other RNA
tcaaggaagatggcatttct

SEQ ID NO: 541 - RNA, 20 nt, synthetic construct
  misc_feature 1..20: note = Description of Artificial Sequence: Synthetic oligonucleotide
  source 1..20: mol_type = other RNA
tcaaggaagatggcatttct

SEQ ID NO: 542 - RNA, 20 nt, synthetic construct
  misc_feature 1..20: note = Description of Artificial Sequence: Synthetic oligonucleotide
  source 1..20: mol_type = other RNA
tcaaggaagatggcatttct

SEQ ID NO: 543 - RNA, 20 nt, synthetic construct
  misc_feature 1..20: note = Description of Artificial Sequence: Synthetic oligonucleotide
  source 1..20: mol_type = other RNA
tcaaggaagatggcatttct

SEQ ID NO: 544 - RNA, 30 nt, synthetic construct
  misc_feature 1..30: note = Description of Artificial Sequence: Synthetic oligonucleotide
  source 1..30: mol_type = other RNA
gccaactgggagctggagcgcaccaaccag

SEQ ID NO: 545 - RNA, 20 nt, synthetic construct
  misc_feature 1..20: note = Description of Artificial Sequence: Synthetic oligonucleotide
  source 1..20: mol_type = other RNA
tcaaggaagatggcatttct

SEQ ID NO: 546 - RNA, 20 nt, synthetic construct
  misc_feature 1..20: note = Description of Artificial Sequence: Synthetic oligonucleotide
  source 1..20: mol_type = other RNA
tcaaggaagatggcatttct

SEQ ID NO: 547 - RNA, 20 nt, synthetic construct
  misc_feature 1..20: note = Description of Artificial Sequence: Synthetic oligonucleotide
  source 1..20: mol_type = other RNA
tcaaggaagatggcatttct

SEQ ID NO: 548 - RNA, 20 nt, synthetic construct
  misc_feature 1..20: note = Description of Artificial Sequence: Synthetic oligonucleotide
  source 1..20: mol_type = other RNA
tcaaggaagatggcatttct

SEQ ID NO: 549 - RNA, 20 nt, synthetic construct
  misc_feature 1..20: note = Description of Artificial Sequence: Synthetic oligonucleotide
  source 1..20: mol_type = other RNA
ccttccctgaaggttcctcc

SEQ ID NO: 550 - RNA, 20 nt, synthetic construct
  misc_feature 1..20: note = Description of Artificial Sequence: Synthetic oligonucleotide
  source 1..20: mol_type = other RNA
ccttccctgaaggttcctcc

SEQ ID NO: 551 - RNA, 20 nt, synthetic construct
  misc_feature 1..20: note = Description of Artificial Sequence: Synthetic oligonucleotide
  source 1..20: mol_type = other RNA
ccttccctgaaggttcctcc

SEQ ID NO: 552 - RNA, 20 nt, synthetic construct
  misc_feature 1..20: note = Description of Artificial Sequence: Synthetic oligonucleotide
  source 1..20: mol_type = other RNA
ccttccctgaaggttcctcc

SEQ ID NO: 553 - RNA, 20 nt, synthetic construct
  misc_feature 1..20: note = Description of Artificial Sequence: Synthetic oligonucleotide
  source 1..20: mol_type = other RNA
ccttccctgaaggttcctcc

SEQ ID NO: 554 - RNA, 20 nt, synthetic construct
  misc_feature 1..20: note = Description of Artificial Sequence: Synthetic oligonucleotide
  source 1..20: mol_type = other RNA
ccttccctgaaggttcctcc

SEQ ID NO: 555 - RNA, 20 nt, synthetic construct
  misc_feature 1..20: note = Description of Artificial Sequence: Synthetic oligonucleotide
  source 1..20: mol_type = other RNA
tcaaggaagatggcatttct

SEQ ID NO: 556 - RNA, 20 nt, synthetic construct
  misc_feature 1..20: note = Description of Artificial Sequence: Synthetic oligonucleotide
  source 1..20: mol_type = other RNA
tcaaggaagatggcatttct

SEQ ID NO: 557 - RNA, 20 nt, synthetic construct
  misc_feature 1..20: note = Description of Artificial Sequence: Synthetic oligonucleotide
  source 1..20: mol_type = other RNA
tcaaggaagatggcatttct

SEQ ID NO: 558 - RNA, 19 nt, synthetic construct
  misc_feature 1..19: note = Description of Artificial Sequence: Synthetic oligonucleotide
  source 1..19: mol_type = other RNA
tcaaggaagatggcatttc

SEQ ID NO: 559 - RNA, 18 nt, synthetic construct
  misc_feature 1..18: note = Description of Artificial Sequence: Synthetic oligonucleotide
  source 1..18: mol_type = other RNA
tcaaggaagatggcattt

SEQ ID NO: 560 - RNA, 19 nt, synthetic construct
  misc_feature 1..19: note = Description of Artificial Sequence: Synthetic oligonucleotide
  source 1..19: mol_type = other RNA
caaggaagatggcatttct

SEQ ID NO: 561 - RNA, 20 nt, synthetic construct
  misc_feature 1..20: note = Description of Artificial Sequence: Synthetic oligonucleotide
  source 1..20: mol_type = other RNA
ggccaaacctcggcttacct

SEQ ID NO: 562 - RNA, 20 nt, synthetic construct
  misc_feature 1..20: note = Description of Artificial Sequence: Synthetic oligonucleotide
  source 1..20: mol_type = other RNA
ggccaaacctcggcttacct

SEQ ID NO: 563 - RNA, 20 nt, synthetic construct
  misc_feature 1..20: note = Description of Artificial Sequence: Synthetic oligonucleotide
  source 1..20: mol_type = other RNA
ttctgtaaggtttttatgtg

SEQ ID NO: 564 - RNA, 20 nt, synthetic construct
  misc_feature 1..20: note = Description of Artificial Sequence: Synthetic oligonucleotide
  source 1..20: mol_type = other RNA
atttctgtaaggtttttatg

SEQ ID NO: 565 - RNA, 20 nt, synthetic construct
  misc_feature 1..20: note = Description of Artificial Sequence: Synthetic oligonucleotide
  source 1..20: mol_type = other RNA
ccatttctgtaaggttttta

SEQ ID NO: 566 - RNA, 20 nt, synthetic construct
  misc_feature 1..20: note = Description of Artificial Sequence: Synthetic oligonucleotide
  source 1..20: mol_type = other RNA
atccatttctgtaaggtttt

SEQ ID NO: 567 - RNA, 20 nt, synthetic construct
  misc_feature 1..20: note = Description of Artificial Sequence: Synthetic oligonucleotide
  source 1..20: mol_type = other RNA
catccatttctgtaaggttt

SEQ ID NO: 568 - RNA, 20 nt, synthetic construct
  misc_feature 1..20: note = Description of Artificial Sequence: Synthetic oligonucleotide
  source 1..20: mol_type = other RNA
ccatccatttctgtaaggtt

SEQ ID NO: 569 - RNA, 20 nt, synthetic construct
  misc_feature 1..20: note = Description of Artificial Sequence: Synthetic oligonucleotide
  source 1..20: mol_type = other RNA
gccatccatttctgtaaggt

SEQ ID NO: 570 - RNA, 20 nt, synthetic construct
  misc_feature 1..20: note = Description of Artificial Sequence: Synthetic oligonucleotide
  source 1..20: mol_type = other RNA
agccatccatttctgtaagg

SEQ ID NO: 571 - RNA, 20 nt, synthetic construct
  misc_feature 1..20: note = Description of Artificial Sequence: Synthetic oligonucleotide
  source 1..20: mol_type = other RNA
cagccatccatttctgtaag

SEQ ID NO: 572 - RNA, 20 nt, synthetic construct
  misc_feature 1..20: note = Description of Artificial Sequence: Synthetic oligonucleotide
  source 1..20: mol_type = other RNA
tcagccatccatttctgtaa

SEQ ID NO: 573 - RNA, 20 nt, synthetic construct
  misc_feature 1..20: note = Description of Artificial Sequence: Synthetic oligonucleotide
  source 1..20: mol_type = other RNA
ttcagccatccatttctgta

SEQ ID NO: 574 - RNA, 20 nt, synthetic construct
  misc_feature 1..20: note = Description of Artificial Sequence: Synthetic oligonucleotide
  source 1..20: mol_type = other RNA
cttcagccatccatttctgt

SEQ ID NO: 575 - RNA, 20 nt, synthetic construct
  misc_feature 1..20: note = Description of Artificial Sequence: Synthetic oligonucleotide
  source 1..20: mol_type = other RNA
acttcagccatccatttctg

SEQ ID NO: 576 - RNA, 20 nt, synthetic construct
  misc_feature 1..20: note = Description of Artificial Sequence: Synthetic oligonucleotide
  source 1..20: mol_type = other RNA
aacttcagccatccatttct

SEQ ID NO: 577 - RNA, 20 nt, synthetic construct
  misc_feature 1..20: note = Description of Artificial Sequence: Synthetic oligonucleotide
  source 1..20: mol_type = other RNA
caacttcagccatccatttc

SEQ ID NO: 578 - RNA, 20 nt, synthetic construct
  misc_feature 1..20: note = Description of Artificial Sequence: Synthetic oligonucleotide
  source 1..20: mol_type = other RNA
tcaacttcagccatccattt

SEQ ID NO: 579 - RNA, 20 nt, synthetic construct
  misc_feature 1..20: note = Description of Artificial Sequence: Synthetic oligonucleotide
  source 1..20: mol_type = other RNA
atcaacttcagccatccatt

SEQ ID NO: 580 - RNA, 20 nt, synthetic construct
  misc_feature 1..20: note = Description of Artificial Sequence: Synthetic oligonucleotide
  source 1..20: mol_type = other RNA
catcaacttcagccatccat

SEQ ID NO: 581 - RNA, 20 nt, synthetic construct
  misc_feature 1..20: note = Description of Artificial Sequence: Synthetic oligonucleotide
  source 1..20: mol_type = other RNA
acatcaacttcagccatcca

SEQ ID NO: 582 - RNA, 20 nt, synthetic construct
  misc_feature 1..20: note = Description of Artificial Sequence: Synthetic oligonucleotide
  source 1..20: mol_type = other RNA
aacatcaacttcagccatcc

SEQ ID NO: 583 - RNA, 20 nt, synthetic construct
  misc_feature 1..20: note = Description of Artificial Sequence: Synthetic oligonucleotide
  source 1..20: mol_type = other RNA
gaaaacatcaacttcagcca

SEQ ID NO: 584 - RNA, 20 nt, synthetic construct
  misc_feature 1..20: note = Description of Artificial Sequence: Synthetic oligonucleotide
  source 1..20: mol_type = other RNA
caggaaaacatcaacttcag

SEQ ID NO: 585 - RNA, 20 nt, synthetic construct
  misc_feature 1..20: note = Description of Artificial Sequence: Synthetic oligonucleotide
  source 1..20: mol_type = other RNA
tttcaggaaaacatcaactt

SEQ ID NO: 586 - RNA, 20 nt, synthetic construct
  misc_feature 1..20: note = Description of Artificial Sequence: Synthetic oligonucleotide
  source 1..20: mol_type = other RNA
ctctttcaggaaaacatcaa

SEQ ID NO: 587 - RNA, 20 nt, synthetic construct
  misc_feature 1..20: note = Description of Artificial Sequence: Synthetic oligonucleotide
  source 1..20: mol_type = other RNA
ttcctctttcaggaaaacat

SEQ ID NO: 588 - RNA, 20 nt, synthetic construct
  misc_feature 1..20: note = Description of Artificial Sequence: Synthetic oligonucleotide
  source 1..20: mol_type = other RNA
gccattcctctttcaggaaa

SEQ ID NO: 589 - RNA, 20 nt, synthetic construct
  misc_feature 1..20: note = Description of Artificial Sequence: Synthetic oligonucleotide
  source 1..20: mol_type = other RNA
ggccattcctctttcaggaa

SEQ ID NO: 590 - RNA, 20 nt, synthetic construct
  misc_feature 1..20: note = Description of Artificial Sequence: Synthetic oligonucleotide
  source 1..20: mol_type = other RNA
aggccattcctctttcagga

SEQ ID NO: 591 - RNA, 20 nt, synthetic construct
  misc_feature 1..20: note = Description of Artificial Sequence: Synthetic oligonucleotide
  source 1..20: mol_type = other RNA
caggccattcctctttcagg

SEQ ID NO: 592 - RNA, 20 nt, synthetic construct
  misc_feature 1..20: note = Description of Artificial Sequence: Synthetic oligonucleotide
  source 1..20: mol_type = other RNA
gcaggccattcctctttcag

SEQ ID NO: 593 - RNA, 20 nt, synthetic construct
  misc_feature 1..20: note = Description of Artificial Sequence: Synthetic oligonucleotide
  source 1..20: mol_type = other RNA
ggcaggccattcctctttca

SEQ ID NO: 594 - RNA, 20 nt, synthetic construct
  misc_feature 1..20: note = Description of Artificial Sequence: Synthetic oligonucleotide
  source 1..20: mol_type = other RNA
gggcaggccattcctctttc

SEQ ID NO: 595 - RNA, 20 nt, synthetic construct
  misc_feature 1..20: note = Description of Artificial Sequence: Synthetic oligonucleotide
  source 1..20: mol_type = other RNA
agggcaggccattcctcttt

SEQ ID NO: 596 - RNA, 20 nt, synthetic construct
  misc_feature 1..20: note = Description of Artificial Sequence: Synthetic oligonucleotide
  source 1..20: mol_type = other RNA
cagggcaggccattcctctt

SEQ ID NO: 597 - RNA, 20 nt, synthetic construct
  misc_feature 1..20: note = Description of Artificial Sequence: Synthetic oligonucleotide
  source 1..20: mol_type = other RNA
ccagggcaggccattcctct

SEQ ID NO: 598 - RNA, 20 nt, synthetic construct
  misc_feature 1..20: note = Description of Artificial Sequence: Synthetic oligonucleotide
  source 1..20: mol_type = other RNA
cccagggcaggccattcctc

SEQ ID NO: 599 - RNA, 20 nt, synthetic construct
  misc_feature 1..20: note = Description of Artificial Sequence: Synthetic oligonucleotide
  source 1..20: mol_type = other RNA
ccccagggcaggccattcct

SEQ ID NO: 600 - RNA, 20 nt, synthetic construct
  misc_feature 1..20: note = Description of Artificial Sequence: Synthetic oligonucleotide
  source 1..20: mol_type = other RNA
cccccagggcaggccattcc

SEQ ID NO: 601 - RNA, 20 nt, synthetic construct
  misc_feature 1..20: note = Description of Artificial Sequence: Synthetic oligonucleotide
  source 1..20: mol_type = other RNA
tcccccagggcaggccattc

SEQ ID NO: 602 - RNA, 20 nt, synthetic construct
  misc_feature 1..20: note = Description of Artificial Sequence: Synthetic oligonucleotide
  source 1..20: mol_type = other RNA
atcccccagggcaggccatt

SEQ ID NO: 603 - RNA, 20 nt, synthetic construct
  misc_feature 1..20: note = Description of Artificial Sequence: Synthetic oligonucleotide
  source 1..20: mol_type = other RNA
catcccccagggcaggccat

SEQ ID NO: 604 - RNA, 20 nt, synthetic construct
  misc_feature 1..20: note = Description of Artificial Sequence: Synthetic oligonucleotide
  source 1..20: mol_type = other RNA
gcatcccccagggcaggcca

SEQ ID NO: 605 - RNA, 20 nt, synthetic construct
  misc_feature 1..20: note = Description of Artificial Sequence: Synthetic oligonucleotide
  source 1..20: mol_type = other RNA
agcatcccccagggcaggcc

SEQ ID NO: 606 - RNA, 20 nt, synthetic construct
  misc_feature 1..20: note = Description of Artificial Sequence: Synthetic oligonucleotide
  source 1..20: mol_type = other RNA
cagcatcccccagggcaggc

SEQ ID NO: 607 - RNA, 20 nt, synthetic construct
  misc_feature 1..20: note = Description of Artificial Sequence: Synthetic oligonucleotide
  source 1..20: mol_type = other RNA
tcagcatcccccagggcagg

SEQ ID NO: 608 - RNA, 20 nt, synthetic construct
  misc_feature 1..20: note = Description of Artificial Sequence: Synthetic oligonucleotide
  source 1..20: mol_type = other RNA
ttcagcatcccccagggcag

SEQ ID NO: 609 - RNA, 20 nt, synthetic construct
  misc_feature 1..20: note = Description of Artificial Sequence: Synthetic oligonucleotide
  source 1..20: mol_type = other RNA
tttcagcatcccccagggca

SEQ ID NO: 610 - RNA, 20 nt, synthetic construct
  misc_feature 1..20: note = Description of Artificial Sequence: Synthetic oligonucleotide
  source 1..20: mol_type = other RNA
atttcagcatcccccagggc

SEQ ID NO: 611 - RNA, 20 nt, synthetic construct
  misc_feature 1..20: note = Description of Artificial Sequence: Synthetic oligonucleotide
  source 1..20: mol_type = other RNA
gatttcagcatcccccaggg

SEQ ID NO: 612 - RNA, 20 nt, synthetic construct
  misc_feature 1..20: note = Description of Artificial Sequence: Synthetic oligonucleotide
  source 1..20: mol_type = other RNA
ggatttcagcatcccccagg

SEQ ID NO: 613 - RNA, 20 nt, synthetic construct
  misc_feature 1..20: note = Description of Artificial Sequence: Synthetic oligonucleotide
  source 1..20: mol_type = other RNA
aggatttcagcatcccccag

SEQ ID NO: 614 - RNA, 20 nt, synthetic construct
  misc_feature 1..20: note = Description of Artificial Sequence: Synthetic oligonucleotide
  source 1..20: mol_type = other RNA
caggatttcagcatccccca

SEQ ID NO: 615 - RNA, 20 nt, synthetic construct
  misc_feature 1..20: note = Description of Artificial Sequence: Synthetic oligonucleotide
  source 1..20: mol_type = other RNA
tcaggatttcagcatccccc

SEQ ID NO: 616 - RNA, 20 nt, synthetic construct
  misc_feature 1..20: note = Description of Artificial Sequence: Synthetic oligonucleotide
  source 1..20: mol_type = other RNA
ttcaggatttcagcatcccc

SEQ ID NO: 617 - RNA, 20 nt, synthetic construct
  misc_feature 1..20: note = Description of Artificial Sequence: Synthetic oligonucleotide
  source 1..20: mol_type = other RNA
tttcaggatttcagcatccc

SEQ ID NO: 618 - RNA, 20 nt, synthetic construct
  misc_feature 1..20: note = Description of Artificial Sequence: Synthetic oligonucleotide
  source 1..20: mol_type = other RNA
ttttcaggatttcagcatcc

SEQ ID NO: 619 - RNA, 20 nt, synthetic construct
  misc_feature 1..20: note = Description of Artificial Sequence: Synthetic oligonucleotide
  source 1..20: mol_type = other RNA
tttttcaggatttcagcatc

SEQ ID NO: 620 - RNA, 20 nt, synthetic construct
  misc_feature 1..20: note = Description of Artificial Sequence: Synthetic oligonucleotide
  source 1..20: mol_type = other RNA
ttttttcaggatttcagcat

SEQ ID NO: 621 - RNA, 20 nt, synthetic construct
  misc_feature 1..20: note = Description of Artificial Sequence: Synthetic oligonucleotide
  source 1..20: mol_type = other RNA
gttttttcaggatttcagca

SEQ ID NO: 622 - RNA, 20 nt, synthetic construct
  misc_feature 1..20: note = Description of Artificial Sequence: Synthetic oligonucleotide
  source 1..20: mol_type = other RNA
tgttttttcaggatttcagc

SEQ ID NO: 623 - RNA, 20 nt, synthetic construct
  misc_feature 1..20: note = Description of Artificial Sequence: Synthetic oligonucleotide
  source 1..20: mol_type = other RNA
ctgttttttcaggatttcag

SEQ ID NO: 624 - RNA, 20 nt, synthetic construct
  misc_feature 1..20: note = Description of Artificial Sequence: Synthetic oligonucleotide
  source 1..20: mol_type = other RNA
gctgttttttcaggatttca

SEQ ID NO: 625 - RNA, 20 nt, synthetic construct
  misc_feature 1..20: note = Description of Artificial Sequence: Synthetic oligonucleotide
  source 1..20: mol_type = other RNA
agctgttttttcaggatttc

SEQ ID NO: 626 - RNA, 20 nt, synthetic construct
  misc_feature 1..20: note = Description of Artificial Sequence: Synthetic oligonucleotide
  source 1..20: mol_type = other RNA
gagctgttttttcaggattt

SEQ ID NO: 627 - RNA, 20 nt, synthetic construct
  misc_feature 1..20: note = Description of Artificial Sequence: Synthetic oligonucleotide
  source 1..20: mol_type = other RNA
tgagctgttttttcaggatt

SEQ ID NO: 628 - RNA, 20 nt, synthetic construct
  misc_feature 1..20: note = Description of Artificial Sequence: Synthetic oligonucleotide
  source 1..20: mol_type = other RNA
ttgagctgttttttcaggat

SEQ ID NO: 629 - RNA, 20 nt, synthetic construct
  misc_feature 1..20: note = Description of Artificial Sequence: Synthetic oligonucleotide
  source 1..20: mol_type = other RNA
tttgagctgttttttcagga

SEQ ID NO: 630 - RNA, 20 nt, synthetic construct
  misc_feature 1..20: note = Description of Artificial Sequence: Synthetic oligonucleotide
  source 1..20: mol_type = other RNA
gtttgagctgttttttcagg

SEQ ID NO: 631 - RNA, 20 nt, synthetic construct
  misc_feature 1..20: note = Description of Artificial Sequence: Synthetic oligonucleotide
  source 1..20: mol_type = other RNA
ttgtttgagctgttttttca

SEQ ID NO: 632 - RNA, 20 nt, synthetic construct
  misc_feature 1..20: note = Description of Artificial Sequence: Synthetic oligonucleotide
  source 1..20: mol_type = other RNA
cattgtttgagctgtttttt

SEQ ID NO: 633 - RNA, 20 nt, synthetic construct
  misc_feature 1..20: note = Description of Artificial Sequence: Synthetic oligonucleotide
  source 1..20: mol_type = other RNA
gcattgtttgagctgttttt

SEQ ID NO: 634 - RNA, 20 nt, synthetic construct
  misc_feature 1..20: note = Description of Artificial Sequence: Synthetic oligonucleotide
  source 1..20: mol_type = other RNA
tgcattgtttgagctgtttt

SEQ ID NO: 635 - RNA, 20 nt, synthetic construct
  misc_feature 1..20: note = Description of Artificial Sequence: Synthetic oligonucleotide
  source 1..20: mol_type = other RNA
ctgcattgtttgagctgttt

SEQ ID NO: 636 - RNA, 20 nt, synthetic construct
  misc_feature 1..20: note = Description of Artificial Sequence: Synthetic oligonucleotide
  source 1..20: mol_type = other RNA
tctgcattgtttgagctgtt

SEQ ID NO: 637 - RNA, 20 nt, synthetic construct
  misc_feature 1..20: note = Description of Artificial Sequence: Synthetic oligonucleotide
  source 1..20: mol_type = other RNA
ctctgcattgtttgagctgt

SEQ ID NO: 638 - RNA, 20 nt, synthetic construct
  misc_feature 1..20: note = Description of Artificial Sequence: Synthetic oligonucleotide
  source 1..20: mol_type = other RNA
actctgcattgtttgagctg

SEQ ID NO: 639 - RNA, 20 nt, synthetic construct
  misc_feature 1..20: note = Description of Artificial Sequence: Synthetic oligonucleotide
  source 1..20: mol_type = other RNA
tactctgcattgtttgagct

SEQ ID NO: 640 - RNA, 20 nt, synthetic construct
  misc_feature 1..20: note = Description of Artificial Sequence: Synthetic oligonucleotide
  source 1..20: mol_type = other RNA
ttactctgcattgtttgagc

SEQ ID NO: 641 - RNA, 20 nt, synthetic construct
  misc_feature 1..20: note = Description of Artificial Sequence: Synthetic oligonucleotide
  source 1..20: mol_type = other RNA
cttactctgcattgtttgag

SEQ ID NO: 642 - RNA, 20 nt, synthetic construct
  misc_feature 1..20: note = Description of Artificial Sequence: Synthetic oligonucleotide
  source 1..20: mol_type = other RNA
tcttactctgcattgtttga

SEQ ID NO: 643 - RNA, 20 nt, synthetic construct
  misc_feature 1..20: note = Description of Artificial Sequence: Synthetic oligonucleotide
  source 1..20: mol_type = other RNA
atcttactctgcattgtttg

SEQ ID NO: 644 - RNA, 20 nt, synthetic construct
  misc_feature 1..20: note = Description of Artificial Sequence: Synthetic oligonucleotide
  source 1..20: mol_type = other RNA
aatcttactctgcattgttt

SEQ ID NO: 645 - RNA, 20 nt, synthetic construct
  misc_feature 1..20: note = Description of Artificial Sequence: Synthetic oligonucleotide
  source 1..20: mol_type = other RNA
caaatcttactctgcattgt

SEQ ID NO: 646 - RNA, 20 nt, synthetic construct
  misc_feature 1..20: note = Description of Artificial Sequence: Synthetic oligonucleotide
  source 1..20: mol_type = other RNA
gatacaaatcttactctgca

SEQ ID NO: 647 - DNA, 20 bp, synthetic construct
  misc_feature 1..20: note = Synthetic oligonucleotide
  modified_base 4: mod_base = OTHER; note = uracil
  modified_base 18: mod_base = OTHER; note = uracil
  source 1..20: mol_type = other DNA
gggtcagctgccaatgctag

SEQ ID NO: 648 - DNA, 20 bp, synthetic construct
  misc_feature 1..20: note = Synthetic oligonucleotide
  modified_base 4: mod_base = OTHER; note = uracil
  modified_base 18: mod_base = OTHER; note = uracil
  source 1..20: mol_type = other DNA
gggtcagctgccaatgctag

SEQ ID NO: 649 - DNA, 20 bp, synthetic construct
  misc_feature 1..20: note = Synthetic oligonucleotide
  modified_base 4: mod_base = OTHER; note = uracil
  modified_base 18: mod_base = OTHER; note = uracil
  source 1..20: mol_type = other DNA
gggtcagctgccaatgctag

SEQ ID NO: 650 - DNA, 20 bp, synthetic construct
  misc_feature 1..20: note = Synthetic oligonucleotide
  modified_base 4: mod_base = OTHER; note = uracil
  modified_base 18: mod_base = OTHER; note = uracil
  source 1..20: mol_type = other DNA
gggtcagctgccaatgctag

SEQ ID NO: 651 - DNA, 20 bp, synthetic construct
  misc_feature 1..20: note = Synthetic oligonucleotide
  modified_base 4: mod_base = OTHER; note = uracil
  source 1..20: mol_type = other DNA
gggtcagctgccaatgctag

SEQ ID NO: 652 - DNA, 20 bp, synthetic construct
  misc_feature 1..20: note = Synthetic oligonucleotide
  modified_base 4: mod_base = OTHER; note = uracil
  source 1..20: mol_type = other DNA
gggtcagctgccaatgctag

SEQ ID NO: 653 - DNA, 20 bp, synthetic construct
  misc_feature 1..20: note = Synthetic oligonucleotide
  modified_base 18: mod_base = OTHER; note = uracil
  source 1..20: mol_type = other DNA
gggtcagctgccaatgctag

SEQ ID NO: 654 - DNA, 20 bp, synthetic construct
  misc_feature 1..20: note = Synthetic oligonucleotide
  modified_base 18: mod_base = OTHER; note = uracil
  source 1..20: mol_type = other DNA
gggtcagctgccaatgctag

SEQ ID NO: 655 - DNA, 20 bp, synthetic construct
  misc_feature 1..20: note = Synthetic oligonucleotide
  modified_base 4: mod_base = OTHER; note = uracil
  modified_base 18: mod_base = OTHER; note = uracil
  source 1..20: mol_type = other DNA
gggtcagctgccaatgctag

SEQ ID NO: 656 - DNA, 20 bp, synthetic construct
  misc_feature 1..20: note = Synthetic oligonucleotide
  modified_base 4: mod_base = OTHER; note = uracil
  modified_base 18: mod_base = OTHER; note = uracil
  source 1..20: mol_type = other DNA
gggtcagctgccaatgctag

SEQ ID NO: 657 - DNA, 20 bp, synthetic construct
  misc_feature 1..20: note = Description of Artificial Sequence: Synthetic oligonucleotide
  source 1..20: mol_type = other DNA
gggtcagctgccaatgctag

SEQ ID NO: 658 - DNA, 20 bp, synthetic construct
  misc_feature 1..20: note = Description of Artificial Sequence: Synthetic oligonucleotide
  source 1..20: mol_type = other DNA
gggtcagctgccaatgctag

SEQ ID NO: 659 - DNA, 20 bp, synthetic construct
  misc_feature 1..20: note = Synthetic oligonucleotide
  modified_base 4: mod_base = OTHER; note = uracil
  modified_base 18: mod_base = OTHER; note = uracil
  source 1..20: mol_type = other DNA
gggtcagctgccaatgctag

SEQ ID NO: 660 - DNA, 20 bp, synthetic construct
  misc_feature 1..20: note = Synthetic oligonucleotide
  modified_base 4: mod_base = OTHER; note = uracil
  modified_base 18: mod_base = OTHER; note = uracil
  source 1..20: mol_type = other DNA
gggtcagctgccaatgctag

SEQ ID NO: 661 - DNA, 20 bp, synthetic construct
  misc_feature 1..20: note = Synthetic oligonucleotide
  modified_base 4: mod_base = OTHER; note = uracil
  modified_base 18: mod_base = OTHER; note = uracil
  source 1..20: mol_type = other DNA
gggtcagctgccaatgctag

SEQ ID NO: 662 - DNA, 20 bp, synthetic construct
  misc_feature 1..20: note = Synthetic oligonucleotide
  modified_base 4: mod_base = OTHER; note = uracil
  modified_base 18: mod_base = OTHER; note = uracil
  source 1..20: mol_type = other DNA
gggtcagctgccaatgctag

SEQ ID NO: 663 - DNA, 20 bp, synthetic construct
  misc_feature 1..20: note = Synthetic oligonucleotide
  modified_base 4: mod_base = OTHER; note = uracil
  modified_base 18: mod_base = OTHER; note = uracil
  source 1..20: mol_type = other DNA
gggtcagctgccaatgctag

SEQ ID NO: 664 - DNA, 20 bp, synthetic construct
  misc_feature 1..20: note = Synthetic oligonucleotide
  modified_base 4: mod_base = OTHER; note = uracil
  modified_base 18: mod_base = OTHER; note = uracil
  source 1..20: mol_type = other DNA
gggtcagctgccaatgctag

SEQ ID NO: 665 - DNA, 20 bp, synthetic construct
  misc_feature 1..20: note = Synthetic oligonucleotide
  modified_base 4: mod_base = OTHER; note = uracil
  modified_base 18: mod_base = OTHER; note = uracil
  source 1..20: mol_type = other DNA
gggtcagctgccaatgctag

SEQ ID NO: 666 - DNA, 20 bp, synthetic construct
  misc_feature 1..20: note = Synthetic oligonucleotide
  modified_base 4: mod_base = OTHER; note = uracil
  modified_base 18: mod_base = OTHER; note = uracil
  source 1..20: mol_type = other DNA
gggtcagctgccaatgctag

SEQ ID NO: 667 - DNA, 20 bp, synthetic construct
  misc_feature 1..20: note = Synthetic oligonucleotide
  modified_base 4: mod_base = OTHER; note = uracil
  modified_base 18: mod_base = OTHER; note = uracil
  source 1..20: mol_type = other DNA
gggtcagctgccaatgctag

SEQ ID NO: 668 - DNA, 20 bp, synthetic construct
  misc_feature 1..20: note = Synthetic oligonucleotide
  modified_base 4: mod_base = OTHER; note = uracil
  modified_base 18: mod_base = OTHER; note = uracil
  source 1..20: mol_type = other DNA
gggtcagctgccaatgctag

SEQ ID NO: 669 - DNA, 20 bp, synthetic construct
  misc_feature 1..20: note = Synthetic oligonucleotide
  modified_base 4: mod_base = OTHER; note = uracil
  modified_base 18: mod_base = OTHER; note = uracil
  source 1..20: mol_type = other DNA
gggtcagctgccaatgctag

SEQ ID NO: 670 - DNA, 20 bp, synthetic construct
  misc_feature 1..20: note = Synthetic oligonucleotide
  modified_base 4: mod_base = OTHER; note = uracil
  modified_base 18: mod_base = OTHER; note = uracil
  source 1..20: mol_type = other DNA
gggtcagctgccaatgctag

SEQ ID NO: 671 - DNA, 20 bp, synthetic construct
  misc_feature 1..20: note = Synthetic oligonucleotide
  modified_base 4: mod_base = OTHER; note = uracil
  modified_base 18: mod_base = OTHER; note = uracil
  source 1..20: mol_type = other DNA
gggtcagctgccaatgctag

SEQ ID NO: 672 - DNA, 20 bp, synthetic construct
  misc_feature 1..20: note = Synthetic oligonucleotide
  modified_base 4: mod_base = OTHER; note = uracil
  modified_base 18: mod_base = OTHER; note = uracil
  source 1..20: mol_type = other DNA
gggtcagctgccaatgctag

SEQ ID NO: 673 - DNA, 20 bp, synthetic construct
  misc_feature 1..20: note = Synthetic oligonucleotide
  modified_base 4: mod_base = OTHER; note = uracil
  modified_base 18: mod_base = OTHER; note = uracil
  source 1..20: mol_type = other DNA
gggtcagctgccaatgctag

SEQ ID NO: 674 - DNA, 20 bp, synthetic construct
  misc_feature 1..20: note = Synthetic oligonucleotide
  modified_base 4: mod_base = OTHER; note = uracil
  modified_base 18: mod_base = OTHER; note = uracil
  source 1..20: mol_type = other DNA
gggtcagctgccaatgctag

SEQ ID NO: 675 - DNA, 20 bp, synthetic construct
  misc_feature 1..20: note = Synthetic oligonucleotide
  modified_base 4: mod_base = OTHER; note = uracil
  modified_base 18: mod_base = OTHER; note = uracil
  source 1..20: mol_type = other DNA
gggtcagctgccaatgctag

SEQ ID NO: 676 - DNA, 20 bp, synthetic construct
  misc_feature 1..20: note = Synthetic oligonucleotide
  modified_base 4: mod_base = OTHER; note = uracil
  modified_base 18: mod_base = OTHER; note = uracil
  source 1..20: mol_type = other DNA
gggtcagctgccaatgctag

SEQ ID NO: 677 - DNA, 20 bp, synthetic construct
  misc_feature 1..20: note = Synthetic oligonucleotide
  modified_base 4: mod_base = OTHER; note = uracil
  modified_base 18: mod_base = OTHER; note = uracil
  source 1..20: mol_type = other DNA
gggtcagctgccaatgctag

SEQ ID NO: 678 - DNA, 20 bp, synthetic construct
  misc_feature 1..20: note = Synthetic oligonucleotide
  modified_base 4: mod_base = OTHER; note = uracil
  modified_base 18: mod_base = OTHER; note = uracil
  source 1..20: mol_type = other DNA
gggtcagctgccaatgctag

SEQ ID NO: 679 - DNA, 20 bp, synthetic construct
  misc_feature 1..20: note = Synthetic oligonucleotide
  modified_base 4: mod_base = OTHER; note = uracil
  modified_base 18: mod_base = OTHER; note = uracil
  source 1..20: mol_type = other DNA
gggtcagctgccaatgctag

SEQ ID NO: 680 - DNA, 20 bp, synthetic construct
  misc_feature 1..20: note = Synthetic oligonucleotide
  modified_base 4: mod_base = OTHER; note = uracil
  modified_base 18: mod_base = OTHER; note = uracil
  source 1..20: mol_type = other DNA
gggtcagctgccaatgctag

SEQ ID NO: 681 - DNA, 20 bp, synthetic construct
  misc_feature 1..20: note = Synthetic oligonucleotide
  modified_base 4: mod_base = OTHER; note = uracil
  modified_base 18: mod_base = OTHER; note = uracil
  source 1..20: mol_type = other DNA
gggtcagctgccaatgctag

SEQ ID NO: 682 - DNA, 20 bp, synthetic construct
  misc_feature 1..20: note = Synthetic oligonucleotide
  modified_base 4: mod_base = OTHER; note = uracil
  modified_base 18: mod_base = OTHER; note = uracil
  source 1..20: mol_type = other DNA
gggtcagctgccaatgctag

SEQ ID NO: 683 - DNA, 20 bp, synthetic construct
  misc_feature 1..20: note = Synthetic oligonucleotide
  modified_base 4: mod_base = OTHER; note = uracil
  modified_base 18: mod_base = OTHER; note = uracil
  source 1..20: mol_type = other DNA
gggtcagctgccaatgctag

SEQ ID NO: 684 - DNA, 20 bp, synthetic construct
  misc_feature 1..20: note = Synthetic oligonucleotide
  modified_base 4: mod_base = OTHER; note = uracil
  modified_base 18: mod_base = OTHER; note = uracil
  source 1..20: mol_type = other DNA
gggtcagctgccaatgctag

SEQ ID NO: 685 - DNA, 20 bp, synthetic construct
  misc_feature 1..20: note = Synthetic oligonucleotide
  modified_base 4: mod_base = OTHER; note = uracil
  modified_base 18: mod_base = OTHER; note = uracil
  source 1..20: mol_type = other DNA
gggtcagctgccaatgctag

SEQ ID NO: 686 - DNA, 20 bp, synthetic construct
  misc_feature 1..20: note = Synthetic oligonucleotide
  modified_base 4: mod_base = OTHER; note = uracil
  modified_base 18: mod_base = OTHER; note = uracil
  source 1..20: mol_type = other DNA
gggtcagctgccaatgctag

SEQ ID NO: 687 - RNA, 20 nt, synthetic construct
  misc_feature 1..20: note = Description of Artificial Sequence: Synthetic oligonucleotide
  source 1..20: mol_type = other RNA
ctagcattggcagctgaccc

SEQ ID NO: 688 - DNA, 20 bp, synthetic construct
  misc_feature 1..20: note = Description of Artificial Sequence: Synthetic oligonucleotide
  source 1..20: mol_type = other DNA
gggtcagctgccaatgctag

SEQ ID NO: 689 - DNA, 20 bp, synthetic construct
  misc_feature 1..20: note = Synthetic oligonucleotide
  modified_base 4: mod_base = OTHER; note = uracil
  modified_base 18: mod_base = OTHER; note = uracil
  source 1..20: mol_type = other DNA
gggtcagctgccaatgctag

SEQ ID NO: 690 - DNA, 20 bp, synthetic construct
  misc_feature 1..20: note = Synthetic oligonucleotide
  modified_base 4: mod_base = OTHER; note = uracil
  modified_base 18: mod_base = OTHER; note = uracil
  source 1..20: mol_type = other DNA
gggtcagctgccaatgctag

SEQ ID NO: 691 - DNA, 20 bp, synthetic construct
  misc_feature 1..20: note = Description of Artificial Sequence: Synthetic oligonucleotide
  source 1..20: mol_type = other DNA
gggtcagctgccaatgctag

SEQ ID NO: 692 - DNA, 20 bp, synthetic construct
  misc_feature 1..20: note = Description of Artificial Sequence: Synthetic oligonucleotide
  source 1..20: mol_type = other DNA
gggtcagctgccaatgctag

SEQ ID NO: 693 - DNA, 20 bp, synthetic construct
  misc_feature 1..20: note = Description of Artificial Sequence: Synthetic oligonucleotide
  source 1..20: mol_type = other DNA
gggtcagctgccaatgctag

SEQ ID NO: 694 - DNA, 20 bp, synthetic construct
  misc_feature 1..20: note = Description of Artificial Sequence: Synthetic oligonucleotide
  source 1..20: mol_type = other DNA
gggtcagctgccaatgctag

SEQ ID NO: 695 - DNA, 20 bp, synthetic construct
  misc_feature 1..20: note = Description of Artificial Sequence: Synthetic oligonucleotide
  source 1..20: mol_type = other DNA
gggtcagctgccaatgctag

SEQ ID NO: 696 - DNA, 20 bp, synthetic construct
  misc_feature 1..20: note = Description of Artificial Sequence: Synthetic oligonucleotide
  source 1..20: mol_type = other DNA
gggtcagctgccaatgctag

SEQ ID NO: 697 - DNA, 20 bp, synthetic construct
  misc_feature 1..20: note = Description of Artificial Sequence: Synthetic oligonucleotide
  source 1..20: mol_type = other DNA
gggtcagctgccaatgctag

SEQ ID NO: 698 - DNA, 20 bp, synthetic construct
  misc_feature 1..20: note = Description of Artificial Sequence: Synthetic oligonucleotide
  source 1..20: mol_type = other DNA
gggtcagctgccaatgctag

SEQ ID NO: 699 - DNA, 20 bp, synthetic construct
  misc_feature 1..20: note = Description of Artificial Sequence: Synthetic oligonucleotide
  source 1..20: mol_type = other DNA
gggtcagctgccaatgctag

SEQ ID NO: 700 - DNA, 20 bp, synthetic construct
  misc_feature 1..20: note = Description of Artificial Sequence: Synthetic oligonucleotide
  source 1..20: mol_type = other DNA
gggtcagctgccaatgctag

SEQ ID NO: 701 - DNA, 20 bp, synthetic construct
  misc_feature 1..20: note = Description of Artificial Sequence: Synthetic oligonucleotide
  source 1..20: mol_type = other DNA
gggtcagctgccaatgctag

SEQ ID NO: 702 - DNA, 20 bp, synthetic construct
  misc_feature 1..20: note = Description of Artificial Sequence: Synthetic oligonucleotide
  source 1..20: mol_type = other DNA
gggtcagctgccaatgctag

SEQ ID NO: 703 - DNA, 20 bp, synthetic construct
  misc_feature 1..20: note = Description of Artificial Sequence: Synthetic oligonucleotide
  source 1..20: mol_type = other DNA
gggtcagctgccaatgctag

SEQ ID NO: 704 - DNA, 20 bp, synthetic construct
  misc_feature 1..20: note = Description of Artificial Sequence: Synthetic oligonucleotide
  source 1..20: mol_type = other DNA
gggtcagctgccaatgctag

SEQ ID NO: 705 - DNA, 20 bp, synthetic construct
  misc_feature 1..20: note = Description of Artificial Sequence: Synthetic oligonucleotide
  source 1..20: mol_type = other DNA
gggtcagctgccaatgctag

SEQ ID NO: 706 - DNA, 20 bp, synthetic construct
  misc_feature 1..20: note = Description of Artificial Sequence: Synthetic oligonucleotide
  source 1..20: mol_type = other DNA
gggtcagctgccaatgctag

SEQ ID NO: 707 - DNA, 20 bp, synthetic construct
  misc_feature 1..20: note = Description of Artificial Sequence: Synthetic oligonucleotide
  source 1..20: mol_type = other DNA
gggtcagctgccaatgctag

SEQ ID NO: 708 - DNA, 20 bp, synthetic construct
  misc_feature 1..20: note = Description of Artificial Sequence: Synthetic oligonucleotide
  source 1..20: mol_type = other DNA
gggtcagctgccaatgctag

SEQ ID NO: 709 - DNA, 20 bp, synthetic construct
  misc_feature 1..20: note = Description of Artificial Sequence: Synthetic oligonucleotide
  source 1..20: mol_type = other DNA
gggtcagctgccaatgctag

SEQ ID NO: 710 - DNA, 20 bp, synthetic construct
  misc_feature 1..20: note = Description of Artificial Sequence: Synthetic oligonucleotide
  source 1..20: mol_type = other DNA
gggtcagctgccaatgctag

SEQ ID NO: 711 - DNA, 20 bp, synthetic construct
  misc_feature 1..20: note = Description of Artificial Sequence: Synthetic oligonucleotide
  source 1..20: mol_type = other DNA
gggtcagctgccaatgctag

SEQ ID NO: 712 - DNA, 20 bp, synthetic construct
  misc_feature 1..20: note = Description of Artificial Sequence: Synthetic oligonucleotide
  source 1..20: mol_type = other DNA
gggtcagctgccaatgctag

SEQ ID NO: 713 - DNA, 20 bp, synthetic construct
  misc_feature 1..20: note = Synthetic oligonucleotide
  modified_base 1: mod_base = OTHER; note = uracil
  modified_base 19: mod_base = OTHER; note = uracil
  source 1..20: mol_type = other DNA
tagcgcccacctcacccctc

SEQ ID NO: 714 - DNA, 20 bp, synthetic construct
  misc_feature 1..20: note = Synthetic oligonucleotide
  modified_base 1..2: mod_base = OTHER; note = uracil
  modified_base 20: mod_base = OTHER; note = uracil
  source 1..20: mol_type = other DNA
ttagcgcccacctcacccct

SEQ ID NO: 715 - DNA, 20 bp, synthetic construct
  misc_feature 1..20: note = Synthetic oligonucleotide
  modified_base 2..3: mod_base = OTHER; note = uracil
  source 1..20: mol_type = other DNA
cttagcgcccacctcacccc

SEQ ID NO: 716 - DNA, 20 bp, synthetic construct
  misc_feature 1..20: note = Description of Artificial Sequence: Synthetic oligonucleotide
  source 1..20: mol_type = other DNA
accccgtcctggaaaccagg

SEQ ID NO: 717 - DNA, 20 bp, synthetic construct
  misc_feature 1..20: note = Description of Artificial Sequence: Synthetic oligonucleotide
  source 1..20: mol_type = other DNA
ccccgtcctggaaaccagga

SEQ ID NO: 718 - DNA, 20 bp, synthetic construct
  misc_feature 1..20: note = Synthetic oligonucleotide
  modified_base 3..4: mod_base = OTHER; note = uracil
  source 1..20: mol_type = other DNA
gcttagcgcccacctcaccc

SEQ ID NO: 719 - RNA, 20 nt, synthetic construct
  misc_feature 1..20: note = Description of Artificial Sequence: Synthetic oligonucleotide
  source 1..20: mol_type = other RNA
ggcttagcgcccacctcacc

SEQ ID NO: 720 - DNA, 20 bp, synthetic construct
  misc_feature 1..20: note = Synthetic oligonucleotide
  modified_base 5: mod_base = OTHER; note = uracil
  source 1..20: mol_type = other DNA
cccgtcctggaaaccaggag

SEQ ID NO: 721 - DNA, 20 bp, synthetic construct
  misc_feature 1..20: note = Synthetic oligonucleotide
  modified_base 1: mod_base = OTHER; note = uracil
  source 1..20: mol_type = other DNA
tgaaccccgtcctggaaacc

SEQ ID NO: 722 - DNA, 20 bp, synthetic construct
  misc_feature 1..20: note = Synthetic oligonucleotide
  modified_base 1..3: mod_base = OTHER; note = uracil
  source 1..20: mol_type = other DNA
tttcccctccctcatcaaca

SEQ ID NO: 723 - DNA, 20 bp, synthetic construct
  misc_feature 1..20: note = Synthetic oligonucleotide
  modified_base 4: mod_base = OTHER; note = uracil
  modified_base 19: mod_base = OTHER; note = uracil
  source 1..20: mol_type = other DNA
agctccagtccctgaaggtg

SEQ ID NO: 724 - DNA, 20 bp, synthetic construct
  misc_feature 1..20: note = Synthetic oligonucleotide
  modified_base 5: mod_base = OTHER; note = uracil
  modified_base 17: mod_base = OTHER; note = uracil
  source 1..20: mol_type = other DNA
aggcttagcgcccacctcac

SEQ ID NO: 725 - DNA, 20 bp, synthetic construct
  misc_feature 1..20: note = Synthetic oligonucleotide
  modified_base 2..4: mod_base = OTHER; note = uracil
  modified_base 16: mod_base = OTHER; note = uracil
  source 1..20: mol_type = other DNA
gtttcccctccctcatcaac

SEQ ID NO: 726 - DNA, 20 bp, synthetic construct
  misc_feature 1..20: note = Description of Artificial Sequence: Synthetic oligonucleotide
  source 1..20: mol_type = other DNA
aaccccgtcctggaaaccag

SEQ ID NO: 727 - DNA, 20 bp, synthetic construct
  misc_feature 1..20: note = Description of Artificial Sequence: Synthetic oligonucleotide
  source 1..20: mol_type = other DNA
gaaccccgtcctggaaacca

SEQ ID NO: 728 - DNA, 20 bp, synthetic construct
  misc_feature 1..20: note = Synthetic oligonucleotide
  modified_base 3: mod_base = OTHER; note = uracil
  modified_base 18: mod_base = OTHER; note = uracil
  modified_base 20: mod_base = OTHER; note = uracil
  source 1..20: mol_type = other DNA
gctccagtccctgaaggtgt

SEQ ID NO: 729 - DNA, 20 bp, synthetic construct
  misc_feature 1..20: note = Synthetic oligonucleotide
  modified_base 1..2: mod_base = OTHER; note = uracil
  source 1..20: mol_type = other DNA
ttgaaccccgtcctggaaac

SEQ ID NO: 730 - DNA, 20 bp, synthetic construct
  misc_feature 1..20: note = Synthetic oligonucleotide
  modified_base 1..2: mod_base = OTHER; note = uracil
  source 1..20: mol_type = other DNA
ttcccctccctcatcaacaa

SEQ ID NO: 731 - DNA, 20 bp, synthetic construct
  misc_feature 1..20: note = Synthetic oligonucleotide
  modified_base 4: mod_base = OTHER; note = uracil
  modified_base 20: mod_base = OTHER; note = uracil
  source 1..20: mol_type = other DNA
ccgtcctggaaaccaggagt

SEQ ID NO: 732 - DNA, 20 bp, synthetic construct
  misc_feature 1..20: note = Description of Artificial Sequence: Synthetic oligonucleotide
  source 1..20: mol_type = other DNA
gcagctccagtccctgaagg

SEQ ID NO: 733 - DNA, 20 bp, synthetic construct
  misc_feature 1..20: note = Synthetic oligonucleotide
  modified_base 1: mod_base = OTHER; note = uracil
  modified_base 19: mod_base = OTHER; note = uracil
  source 1..20: mol_type = other DNA
tgccaggctggttatgactc

SEQ ID NO: 734 - DNA, 20 bp, synthetic construct
  misc_feature 1..20: note = Synthetic oligonucleotide
  modified_base 3: mod_base = OTHER; note = uracil
  modified_base 19: mod_base = OTHER; note = uracil
  source 1..20: mol_type = other DNA
cgtcctggaaaccaggagtg

SEQ ID NO: 735 - DNA, 20 bp, synthetic construct
  misc_feature 1..20: note = Synthetic oligonucleotide
  modified_base 5: mod_base = OTHER; note = uracil
  modified_base 20: mod_base = OTHER; note = uracil
  source 1..20: mol_type = other DNA
cagctccagtccctgaaggt

SEQ ID NO: 736 - DNA, 20 bp, synthetic construct
  misc_feature 1..20: note = Synthetic oligonucleotide
  modified_base 2: mod_base = OTHER; note = uracil
  modified_base 16: mod_base = OTHER; note = uracil
  modified_base 20: mod_base = OTHER; note = uracil
  source 1..20: mol_type = other DNA
ctgccaggctggttatgact

SEQ ID NO: 737 - RNA, 20 nt, synthetic construct
  misc_feature 1..20: note = Description of Artificial Sequence: Synthetic oligonucleotide
  source 1..20: mol_type = other RNA
tcctggaaaccaggagtgcc

SEQ ID NO: 738 - DNA, 20 bp, synthetic construct
  misc_feature 1..20: note = Synthetic oligonucleotide
  modified_base 18: mod_base = OTHER; note = uracil
  source 1..20: mol_type = other DNA
aaggcttagcgcccacctca

SEQ ID NO: 739 - DNA, 20 bp, synthetic construct
  misc_feature 1..20: note = Synthetic oligonucleotide
  modified_base 17: mod_base = OTHER; note = uracil
  source 1..20: mol_type = other DNA
ccaggctggttatgactcag

SEQ ID NO: 740 - RNA, 20 nt, synthetic construct
  misc_feature 1..20: note = Description of Artificial Sequence: Synthetic oligonucleotide
  source 1..20: mol_type = other RNA
cctggaaaccaggagtgcca

SEQ ID NO: 741 - DNA, 20 bp, synthetic construct
  misc_feature 1..20: note = Synthetic oligonucleotide
  modified_base 18: mod_base = OTHER; note = uracil
  source 1..20: mol_type = other DNA
gccaggctggttatgactca

SEQ ID NO: 742 - DNA, 20 bp, synthetic construct
  misc_feature 1..20: note = Synthetic oligonucleotide
  modified_base 19: mod_base = OTHER; note = uracil
  source 1..20: mol_type = other DNA
aaaggcttagcgcccacctc

SEQ ID NO: 743 - DNA, 20 bp, synthetic construct
  misc_feature 1..20: note = Synthetic oligonucleotide
  modified_base 4..5: mod_base = OTHER; note = uracil
  modified_base 16: mod_base = OTHER; note = uracil
  source 1..20: mol_type = other DNA
ggattgggagttacttgcca

SEQ ID NO: 744 - RNA, 20 nt, synthetic construct
  misc_feature 1..20: note = Description of Artificial Sequence: Synthetic oligonucleotide
  source 1..20: mol_type = other RNA
gtcctggaaaccaggagtgc

SEQ ID NO: 745 - DNA, 20 bp, synthetic construct
  misc_feature 1..20: note = Synthetic oligonucleotide
  modified_base 16: mod_base = OTHER; note = uracil
  source 1..20: mol_type = other DNA
caggctggttatgactcaga

SEQ ID NO: 746 - DNA, 20 bp, synthetic construct
  misc_feature 1..20: note = Synthetic oligonucleotide
  modified_base 18..19: mod_base = OTHER; note = uracil
  source 1..20: mol_type = other DNA
gggagttacttgccaacttg

SEQ ID NO: 747 - DNA, 20 bp, synthetic construct
  misc_feature 1..20: note = Synthetic oligonucleotide
  modified_base 1: mod_base = OTHER; note = uracil
  modified_base 19..20: mod_base = OTHER; note = uracil
  source 1..20: mol_type = other DNA
tgggagttacttgccaactt

SEQ ID NO: 748 - DNA, 20 bp, synthetic construct
  misc_feature 1..20: note = Synthetic oligonucleotide
  modified_base 1..2: mod_base = OTHER; note = uracil
  modified_base 20: mod_base = OTHER; note = uracil
  source 1..20: mol_type = other DNA
ttgggagttacttgccaact

SEQ ID NO: 749 - DNA, 20 bp, synthetic construct
  misc_feature 1..20: note = Synthetic oligonucleotide
  modified_base 2..4: mod_base = OTHER; note = uracil
  modified_base 20: mod_base = OTHER; note = uracil
  source 1..20: mol_type = other DNA
atttcctcaacactcagcct

SEQ ID NO: 750 - DNA, 20 bp, synthetic construct
  misc_feature 1..20: note = Synthetic oligonucleotide
  modified_base 5: mod_base = OTHER; note = uracil
  source 1..20: mol_type = other DNA
cccctccctcatcaacaaaa

SEQ ID NO: 751 - DNA, 20 bp, synthetic construct
  misc_feature 1..20: note = Synthetic oligonucleotide
  modified_base 4..5: mod_base = OTHER; note = uracil
  modified_base 18..19: mod_base = OTHER; note = uracil
  source 1..20: mol_type = other DNA
acatttccacttgccagtta

SEQ ID NO: 752 - DNA, 20 bp, synthetic construct
  misc_feature 1..20: note = Synthetic oligonucleotide
  modified_base 20: mod_base = OTHER; note = uracil
  source 1..20: mol_type = other DNA
aaaaggcttagcgcccacct

SEQ ID NO: 753 - DNA, 20 bp, synthetic construct
  misc_feature 1..20: note = Synthetic oligonucleotide
  modified_base 4: mod_base = OTHER; note = uracil
  source 1..20: mol_type = other DNA
acctgtctgaggcaaacgaa

SEQ ID NO: 754 - DNA, 20 bp, synthetic construct
  misc_feature 1..20: note = Synthetic oligonucleotide
  modified_base 2..3: mod_base = OTHER; note = uracil
  source 1..20: mol_type = other DNA
attgggagttacttgccaac

SEQ ID NO: 755 - RNA, 20 nt, synthetic construct
  misc_feature 1..20: note = Description of Artificial Sequence: Synthetic oligonucleotide
  source 1..20: mol_type = other RNA
tcaacaaaagcccaccctct

SEQ ID NO: 756 - DNA, 20 bp, synthetic construct
  misc_feature 1..20: note = Synthetic oligonucleotide
  modified_base 2: mod_base = OTHER; note = uracil
  source 1..20: mol_type = other DNA
ctaagatgctagcttggcca

SEQ ID NO: 757 - DNA, 20 bp, synthetic construct
  misc_feature 1..20: note = Description of Artificial Sequence: Synthetic oligonucleotide
  source 1..20: mol_type = other DNA
gggtcagctgccaatgctag

SEQ ID NO: 758 - DNA, 20 bp, synthetic construct
  misc_feature 1..20: note = Description of Artificial Sequence: Synthetic oligonucleotide
  source 1..20: mol_type = other DNA
gggtcagctgccaatgctag

SEQ ID NO: 759 - DNA, 20 bp, synthetic construct
  misc_feature 1..20: note = Description of Artificial Sequence: Synthetic oligonucleotide
  source 1..20: mol_type = other DNA
gggtcagctgccaatgctag

SEQ ID NO: 760 - DNA, 20 bp, synthetic construct
  misc_feature 1..20: note = Description of Artificial Sequence: Synthetic oligonucleotide
  source 1..20: mol_type = other DNA
gggtcagctgccaatgctag

SEQ ID NO: 761 - DNA, 20 bp, synthetic construct
  misc_feature 1..20: note = Description of Artificial Sequence: Synthetic oligonucleotide
  source 1..20: mol_type = other DNA
gggtcagctgccaatgctag

SEQ ID NO: 762 - RNA, 20 nt, synthetic construct
  misc_feature 1..20: note = Description of Artificial Sequence: Synthetic oligonucleotide
  source 1..20: mol_type = other RNA
tcaaggaagatggcatttct

SEQ ID NO: 763 - RNA, 20 nt, synthetic construct
  misc_feature 1..20: note = Description of Artificial Sequence: Synthetic oligonucleotide
  source 1..20: mol_type = other RNA
tcaaggaagatggcatttct

SEQ ID NO: 764 - RNA, 20 nt, synthetic construct
  misc_feature 1..20: note = Description of Artificial Sequence: Synthetic oligonucleotide
  source 1..20: mol_type = other RNA
ggccaaacctcggcttacct

SEQ ID NO: 765 - RNA, 30 nt, synthetic construct; identical to SEQ ID NO: 13
  misc_feature 1..30: note = Description of Artificial Sequence: Synthetic oligonucleotide
  source 1..30: mol_type = other RNA

SEQ ID NO: 766 - RNA, 25 nt, synthetic construct
  misc_feature 1..25: note = Description of Artificial Sequence: Synthetic oligonucleotide
  source 1..25: mol_type = other RNA
accagagtaacagtctgagtaggag

SEQ ID NO: 767 - RNA, 25 nt, synthetic construct
  misc_feature 1..25: note = Description of Artificial Sequence: Synthetic oligonucleotide
  source 1..25: mol_type = other RNA
caccagagtaacagtctgagtagga

SEQ ID NO: 768 - RNA, 25 nt, synthetic construct
  misc_feature 1..25: note = Description of Artificial Sequence: Synthetic oligonucleotide
  source 1..25: mol_type = other RNA
tcaccagagtaacagtctgagtagg

SEQ ID NO: 769 - RNA, 25 nt, synthetic construct
  misc_feature 1..25: note = Description of Artificial Sequence: Synthetic oligonucleotide
  source 1..25: mol_type = other RNA
gtcaccagagtaacagtctgagtag

SEQ ID NO: 770 - RNA, 25 nt, synthetic construct
  misc_feature 1..25: note = Description of Artificial Sequence: Synthetic oligonucleotide
  source 1..25: mol_type = other RNA
gttgtgtcaccagagtaacagtctg

SEQ ID NO: 771 - RNA, 25 nt, synthetic construct
  misc_feature 1..25: note = Description of Artificial Sequence: Synthetic oligonucleotide
  source 1..25: mol_type = other RNA
ggttgtgtcaccagagtaacagtct

SEQ ID NO: 772 - RNA, 25 nt, synthetic construct
  misc_feature 1..25: note = Description of Artificial Sequence: Synthetic oligonucleotide
  source 1..25: mol_type = other RNA
aggttgtgtcaccagagtaacagtc

SEQ ID NO: 773 - RNA, 25 nt, synthetic construct
  misc_feature 1..25: note = Description of Artificial Sequence: Synthetic oligonucleotide
  source 1..25: mol_type = other RNA
caggttgtgtcaccagagtaacagt

SEQ ID NO: 774 - RNA, 25 nt, synthetic construct
  misc_feature 1..25: note = Description of Artificial Sequence: Synthetic oligonucleotide
  source 1..25: mol_type = other RNA
acaggttgtgtcaccagagtaacag

SEQ ID NO: 775 - RNA, 25 nt, synthetic construct
  misc_feature 1..25: note = Description of Artificial Sequence: Synthetic oligonucleotide
  source 1..25: mol_type = other RNA
ccacaggttgtgtcaccagagtaac

SEQ ID NO: 776 - RNA, 25 nt, synthetic construct
  misc_feature 1..25: note = Description of Artificial Sequence: Synthetic oligonucleotide
  source 1..25: mol_type = other RNA
accacaggttgtgtcaccagagtaa

SEQ ID NO: 777 - RNA, 25 nt, synthetic construct
  misc_feature 1..25: note = Description of Artificial Sequence: Synthetic oligonucleotide
  source 1..25: mol_type = other RNA
aaccacaggttgtgtcaccagagta

SEQ ID NO: 778 - RNA, 25 nt, synthetic construct
  misc_feature 1..25: note = Description of Artificial Sequence: Synthetic oligonucleotide
  source 1..25: mol_type = other RNA
taaccacaggttgtgtcaccagagt

SEQ ID NO: 779 - RNA, 25 nt, synthetic construct
  misc_feature 1..25: note = Description of Artificial Sequence: Synthetic oligonucleotide
  source 1..25: mol_type = other RNA
gtaaccacaggttgtgtcaccagag

SEQ ID NO: 780 - RNA, 25 nt, synthetic construct
  misc_feature 1..25: note = Description of Artificial Sequence: Synthetic oligonucleotide
  source 1..25: mol_type = other RNA
agtaaccacaggttgtgtcaccaga

SEQ ID NO: 781 - RNA, 25 nt, synthetic construct
  misc_feature 1..25: note = Description of Artificial Sequence: Synthetic oligonucleotide
  source 1..25: mol_type = other RNA
tagtaaccacaggttgtgtcaccag

SEQ ID NO: 782 - RNA, 25 nt, synthetic construct
  misc_feature 1..25: note = Description of Artificial Sequence: Synthetic oligonucleotide
  source 1..25: mol_type = other RNA
ttagtaaccacaggttgtgtcacca

SEQ ID NO: 783 - RNA, 25 nt, synthetic construct
  misc_feature 1..25: note = Description of Artificial Sequence: Synthetic oligonucleotide
  source 1..25: mol_type = other RNA
cttagtaaccacaggttgtgtcacc

SEQ ID NO: 784 - RNA, 25 nt, synthetic construct
  misc_feature 1..25: note = Description of Artificial Sequence: Synthetic oligonucleotide
  source 1..25: mol_type = other RNA
ccttagtaaccacaggttgtgtcac

SEQ ID NO: 785 - RNA, 25 nt, synthetic construct
  misc_feature 1..25: note = Description of Artificial Sequence: Synthetic oligonucleotide
  source 1..25: mol_type = other RNA
tccttagtaaccacaggttgtgtca

SEQ ID NO: 786 - RNA, 25 nt, synthetic construct
  misc_feature 1..25: note = Description of Artificial Sequence: Synthetic oligonucleotide
  source 1..25: mol_type = other RNA
gtttccttagtaaccacaggttgtg

SEQ ID NO: 787 - RNA, 25 nt, synthetic construct
  misc_feature 1..25: note = Description of Artificial Sequence: Synthetic oligonucleotide
  source 1..25: mol_type = other RNA
agtttccttagtaaccacaggttgt

SEQ ID NO: 788 - RNA, 25 nt, synthetic construct
  misc_feature 1..25: note = Description of Artificial Sequence: Synthetic oligonucleotide
  source 1..25: mol_type = other RNA
cagtttccttagtaaccacaggttg

SEQ ID NO: 789 - RNA, 25 nt, synthetic construct
  misc_feature 1..25: note = Description of Artificial Sequence: Synthetic oligonucleotide
  source 1..25: mol_type = other RNA
gcagtttccttagtaaccacaggtt

SEQ ID NO: 790 - RNA, 25 nt, synthetic construct
  misc_feature 1..25: note = Description of Artificial Sequence: Synthetic oligonucleotide
  source 1..25: mol_type = other RNA
ggcagtttccttagtaaccacaggt

SEQ ID NO: 791 - RNA, 25 nt, synthetic construct
  misc_feature 1..25: note = Description of Artificial Sequence: Synthetic oligonucleotide
  source 1..25: mol_type = other RNA
tggcagtttccttagtaaccacagg

SEQ ID NO: 792 - RNA, 25 nt, synthetic construct
  misc_feature 1..25: note = Description of Artificial Sequence: Synthetic oligonucleotide
  source 1..25: mol_type = other RNA
atggcagtttccttagtaaccacag

SEQ ID NO: 793 - RNA, 25 nt, synthetic construct
  misc_feature 1..25: note = Description of Artificial Sequence: Synthetic oligonucleotide
  source 1..25: mol_type = other RNA
agatggcagtttccttagtaaccac

SEQ ID NO: 794 - RNA, 25 nt, synthetic construct
  misc_feature 1..25: note = Description of Artificial Sequence: Synthetic oligonucleotide
  source 1..25: mol_type = other RNA
gagatggcagtttccttagtaacca

SEQ ID NO: 795 - RNA, 25 nt, synthetic construct
  misc_feature 1..25: note = Description of Artificial Sequence: Synthetic oligonucleotide
  source 1..25: mol_type = other RNA
ggagatggcagtttccttagtaacc

SEQ ID NO: 796 - RNA, 25 nt, synthetic construct
  misc_feature 1..25: note = Description of Artificial Sequence: Synthetic oligonucleotide
  source 1..25: mol_type = other RNA
tggagatggcagtttccttagtaac

SEQ ID NO: 797 - RNA, 25 nt, synthetic construct
  misc_feature 1..25: note = Description of Artificial Sequence: Synthetic oligonucleotide
  source 1..25: mol_type = other RNA
ttggagatggcagtttccttagtaa

SEQ ID NO: 798 - RNA, 25 nt, synthetic construct
  misc_feature 1..25: note = Description of Artificial Sequence: Synthetic oligonucleotide
  source 1..25: mol_type = other RNA
tttggagatggcagtttccttagta

SEQ ID NO: 799 - RNA, 25 nt, synthetic construct
  misc_feature 1..25: note = Description of Artificial Sequence: Synthetic oligonucleotide
  source 1..25: mol_type = other RNA
agtttggagatggcagtttccttag

SEQ ID NO: 800 - RNA, 25 nt, synthetic construct
  misc_feature 1..25: note = Description of Artificial Sequence: Synthetic oligonucleotide
  source 1..25: mol_type = other RNA
tagtttggagatggcagtttcctta

SEQ ID NO: 801 - RNA, 25 nt, synthetic construct
  misc_feature 1..25: note = Description of Artificial Sequence: Synthetic oligonucleotide
  source 1..25: mol_type = other RNA
ctagtttggagatggcagtttcctt

SEQ ID NO: 802 - RNA, 25 nt, synthetic construct
  misc_feature 1..25: note = Description of Artificial Sequence: Synthetic oligonucleotide
  source 1..25: mol_type = other RNA
tctagtttggagatggcagtttcct

SEQ ID NO: 803 - RNA, 25 nt, synthetic construct
  misc_feature 1..25: note = Description of Artificial Sequence: Synthetic oligonucleotide
  source 1..25: mol_type = other RNA
ttctagtttggagatggcagtttcc

SEQ ID NO: 804 - RNA, 25 nt, synthetic construct
  misc_feature 1..25: note = Description of Artificial Sequence: Synthetic oligonucleotide
  source 1..25: mol_type = other RNA
catttctagtttggagatggcagtt

SEQ ID NO: 805 - RNA, 25 nt, synthetic construct
  misc_feature 1..25: note = Description of Artificial Sequence: Synthetic oligonucleotide
  source 1..25: mol_type = other RNA
gcatttctagtttggagatggcagt

SEQ ID NO: 806 - RNA, 25 nt, synthetic construct
  misc_feature 1..25: note = Description of Artificial Sequence: Synthetic oligonucleotide
  source 1..25: mol_type = other RNA
atggcatttctagtttggagatggc

SEQ ID NO: 807 - RNA, 25 nt, synthetic construct
  misc_feature 1..25: note = Description of Artificial Sequence: Synthetic oligonucleotide
  source 1..25: mol_type = other RNA
gaagatggcatttctagtttggaga

SEQ ID NO: 808 - RNA, 25 nt, synthetic construct
  misc_feature 1..25: note = Description of Artificial Sequence: Synthetic oligonucleotide
  source 1..25: mol_type = other RNA
aggaagatggcatttctagtttgga

SEQ ID NO: 809 - RNA, 25 nt, synthetic construct
  misc_feature 1..25: note = Description of Artificial Sequence: Synthetic oligonucleotide
  source 1..25: mol_type = other RNA
aaggaagatggcatttctagtttgg

SEQ ID NO: 810 - RNA, 25 nt, synthetic construct
  misc_feature 1..25: note = Description of Artificial Sequence: Synthetic oligonucleotide
  source 1..25: mol_type = other RNA
caaggaagatggcatttctagtttg

SEQ ID NO: 811 - RNA, 25 nt, synthetic construct
  misc_feature 1..25: note = Description of Artificial Sequence: Synthetic oligonucleotide
  source 1..25: mol_type = other RNA
catcaaggaagatggcatttctagt

SEQ ID NO: 812 - RNA, 25 nt, synthetic construct
  misc_feature 1..25: note = Description of Artificial Sequence: Synthetic oligonucleotide
  source 1..25: mol_type = other RNA
acatcaaggaagatggcatttctag

SEQ ID NO: 813 - RNA, 25 nt, synthetic construct
  misc_feature 1..25: note = Description of Artificial Sequence: Synthetic oligonucleotide
  source 1..25: mol_type = other RNA
aacatcaaggaagatggcatttcta

SEQ ID NO: 814 - RNA, 25 nt, synthetic construct
  misc_feature 1..25: note = Description of Artificial Sequence: Synthetic oligonucleotide
  source 1..25: mol_type = other RNA
caacatcaaggaagatggcatttct

SEQ ID NO: 815 - RNA, 25 nt, synthetic construct
  misc_feature 1..25: note = Description of Artificial Sequence: Synthetic oligonucleotide
  source 1..25: mol_type = other RNA
ctccaacatcaaggaagatggcatt

SEQ ID NO: 816 - RNA, 25 nt, synthetic construct
  misc_feature 1..25: note = Description of Artificial Sequence: Synthetic oligonucleotide
  source 1..25: mol_type = other RNA
acctccaacatcaaggaagatggca

SEQ ID NO: 817 - RNA, 25 nt, synthetic construct
  misc_feature 1..25: note = Description of Artificial Sequence: Synthetic oligonucleotide
  source 1..25: mol_type = other RNA
gtacctccaacatcaaggaagatgg

SEQ ID NO: 818 - RNA, 25 nt, synthetic construct
  misc_feature 1..25: note = Description of Artificial Sequence: Synthetic oligonucleotide
  source 1..25: mol_type = other RNA
aggtacctccaacatcaaggaagat

SEQ ID NO: 819 - RNA, 25 nt, synthetic construct
  misc_feature 1..25: note = Description of Artificial Sequence: Synthetic oligonucleotide
  source 1..25: mol_type = other RNA
agagcaggtacctccaacatcaagg

SEQ ID NO: 820 - RNA, 25 nt, synthetic construct
  misc_feature 1..25: note = Description of Artificial Sequence: Synthetic oligonucleotide
  source 1..25: mol_type = other RNA
cagagcaggtacctccaacatcaag

SEQ ID NO: 821 - RNA, 25 nt, synthetic construct
  misc_feature 1..25: note = Description of Artificial Sequence: Synthetic oligonucleotide
  source 1..25: mol_type = other RNA
ctgccagagcaggtacctccaacat

SEQ ID NO: 822 - RNA, 25 nt, synthetic construct
  misc_feature 1..25: note = Description of Artificial Sequence: Synthetic oligonucleotide
  source 1..25: mol_type = other RNA
tctgccagagcaggtacctccaaca

SEQ ID NO: 823 - RNA, 25 nt, synthetic construct
  misc_feature 1..25: note = Description of Artificial Sequence: Synthetic oligonucleotide
  source 1..25: mol_type = other RNA
atctgccagagcaggtacctccaac

SEQ ID NO: 824 - RNA, 25 nt, synthetic construct
  misc_feature 1..25: note = Description of Artificial Sequence: Synthetic oligonucleotide
  source 1..25: mol_type = other RNA
aatctgccagagcaggtacctccaa

SEQ ID NO: 825 - RNA, 25 nt, synthetic construct
  misc_feature 1..25: note = Description of Artificial Sequence: Synthetic oligonucleotide
  source 1..25: mol_type = other RNA
aaatctgccagagcaggtacctcca

SEQ ID NO: 826 - RNA, 25 nt, synthetic construct
  misc_feature 1..25: note = Description of Artificial Sequence: Synthetic oligonucleotide
  source 1..25: mol_type = other RNA
gaaatctgccagagcaggtacctcc

SEQ ID NO: 827 - RNA, 25 nt, synthetic construct
  misc_feature 1..25: note = Description of Artificial Sequence: Synthetic oligonucleotide
  source 1..25: mol_type = other RNA
tgaaatctgccagagcaggtacctc

SEQ ID NO: 828 - RNA, 25 nt, synthetic construct
  misc_feature 1..25: note = Description of Artificial Sequence: Synthetic oligonucleotide
  source 1..25: mol_type = other RNA
ttgaaatctgccagagcaggtacct

SEQ ID NO: 829 - RNA, 25 nt, synthetic construct
  misc_feature 1..25: note = Description of Artificial Sequence: Synthetic oligonucleotide
  source 1..25: mol_type = other RNA
cccggttgaaatctgccagagcagg

SEQ ID NO: 830 - RNA, 25 nt, synthetic construct
  misc_feature 1..25: note = Description of Artificial Sequence: Synthetic oligonucleotide
  source 1..25: mol_type = other RNA
ccaagcccggttgaaatctgccaga

SEQ ID NO: 831 - RNA, 25 nt, synthetic construct
  misc_feature 1..25: note = Description of Artificial Sequence: Synthetic oligonucleotide
  source 1..25: mol_type = other RNA
tccaagcccggttgaaatctgccag

SEQ ID NO: 832 - RNA, 25 nt, synthetic construct
  misc_feature 1..25: note = Description of Artificial Sequence: Synthetic oligonucleotide
  source 1..25: mol_type = other RNA
gtccaagcccggttgaaatctgcca

SEQ ID NO: 833 - RNA, 25 nt, synthetic construct
  misc_feature 1..25: note = Description of Artificial Sequence: Synthetic oligonucleotide
  source 1..25: mol_type = other RNA
tctgtccaagcccggttgaaatctg

SEQ ID NO: 834 - RNA, 25 nt, synthetic construct
  misc_feature 1..25: note = Description of Artificial Sequence: Synthetic oligonucleotide
  source 1..25: mol_type = other RNA
ttctgtccaagcccggttgaaatct

SEQ ID NO: 835 - RNA, 25 nt, synthetic construct
  misc_feature 1..25: note = Description of Artificial Sequence: Synthetic oligonucleotide
  source 1..25: mol_type = other RNA
gttctgtccaagcccggttgaaatc

SEQ ID NO: 836 - RNA, 25 nt, synthetic construct
  misc_feature 1..25: note = Description of Artificial Sequence: Synthetic oligonucleotide
  source 1..25: mol_type = other RNA
agttctgtccaagcccggttgaaat

SEQ ID NO: 837 - RNA, 25 nt, synthetic construct
  misc_feature 1..25: note = Description of Artificial Sequence: Synthetic oligonucleotide
  source 1..25: mol_type = other RNA
aagttctgtccaagcccggttgaaa

SEQ ID NO: 838 - RNA, 25 nt, synthetic construct
  misc_feature 1..25: note = Description of Artificial Sequence: Synthetic oligonucleotide
  source 1..25: mol_type = other RNA
taagttctgtccaagcccggttgaa

SEQ ID NO: 839 - RNA, 25 nt, synthetic construct
  misc_feature 1..25: note = Description of Artificial Sequence: Synthetic oligonucleotide
  source 1..25: mol_type = other RNA
gtaagttctgtccaagcccggttga

SEQ ID NO: 840 - RNA, 25 nt, synthetic construct
  misc_feature 1..25: note = Description of Artificial Sequence: Synthetic oligonucleotide
  source 1..25: mol_type = other RNA
ggtaagttctgtccaagcccggttg

SEQ ID NO: 841 - RNA, 25 nt, synthetic construct
  misc_feature 1..25: note = Description of Artificial Sequence: Synthetic oligonucleotide
  source 1..25: mol_type = other RNA
cggtaagttctgtccaagcccggtt

SEQ ID NO: 842 - RNA, 25 nt, synthetic construct
  misc_feature 1..25: note = Description of Artificial Sequence: Synthetic oligonucleotide
  source 1..25: mol_type = other RNA
tcggtaagttctgtccaagcccggt

SEQ ID NO: 843 - RNA, 25 nt, synthetic construct
  misc_feature 1..25: note = Description of Artificial Sequence: Synthetic oligonucleotide
  source 1..25: mol_type = other RNA
gtcggtaagttctgtccaagcccgg

SEQ ID NO: 844 - RNA, 25 nt, synthetic construct
  misc_feature 1..25: note = Description of Artificial Sequence: Synthetic oligonucleotide
  source 1..25: mol_type = other RNA
agtcggtaagttctgtccaagcccg

SEQ ID NO: 845 - RNA, 25 nt, synthetic construct
  misc_feature 1..25: note = Description of Artificial Sequence: Synthetic oligonucleotide
  source 1..25: mol_type = other RNA
cagtcggtaagttctgtccaagccc

SEQ ID NO: 846 - RNA, 25 nt, synthetic construct
  misc_feature 1..25: note = Description of Artificial Sequence: Synthetic oligonucleotide
  source 1..25: mol_type = other RNA
aaagccagtcggtaagttctgtcca

SEQ ID NO: 847 - RNA, 25 nt, synthetic construct
  misc_feature 1..25: note = Description of Artificial Sequence: Synthetic oligonucleotide
  source 1..25: mol_type = other RNA
gaaagccagtcggtaagttctgtcc

SEQ ID NO: 848 - RNA, 25 nt, synthetic construct
  misc_feature 1..25: note = Description of Artificial Sequence: Synthetic oligonucleotide
  source 1..25: mol_type = other RNA
gtcacccaccatcaccctctgtgat

SEQ ID NO: 849 - RNA, 25 nt, synthetic construct
  misc_feature 1..25: note = Description of Artificial Sequence: Synthetic oligonucleotide
  source 1..25: mol_type = other RNA
ggtcacccaccatcaccctctgtga

SEQ ID NO: 850 - RNA, 25 nt, synthetic construct
  misc_feature 1..25: note = Description of Artificial Sequence: Synthetic oligonucleotide
  source 1..25: mol_type = other RNA
aaggtcacccaccatcaccctctgt

SEQ ID NO: 851 - RNA, 25 nt, synthetic construct
  misc_feature 1..25: note = Description of Artificial Sequence: Synthetic oligonucleotide
  source 1..25: mol_type = other RNA
caaggtcacccaccatcaccctctg

SEQ ID NO: 852 - RNA, 25 nt, synthetic construct
  misc_feature 1..25: note = Description of Artificial Sequence: Synthetic oligonucleotide
  source 1..25: mol_type = other RNA
tcaaggtcacccaccatcaccctct

SEQ ID NO: 853 - RNA, 25 nt, synthetic construct
  misc_feature 1..25: note = Description of Artificial Sequence: Synthetic oligonucleotide
  source 1..25: mol_type = other RNA
ctcaaggtcacccaccatcaccctc

SEQ ID NO: 854 - RNA, 25 nt, synthetic construct
  misc_feature 1..25: note = Description of Artificial Sequence: Synthetic oligonucleotide
  source 1..25: mol_type = other RNA
cttgatcaagcagagaaagccagtc

SEQ ID NO: 855 - RNA, 25 nt, synthetic construct
  misc_feature 1..25: note = Description of Artificial Sequence: Synthetic oligonucleotide
  source 1..25: mol_type = other RNA
ataacttgatcaagcagagaaagcc

SEQ ID NO: 856 - RNA, 20 nt, synthetic construct
  misc_feature 1..20: note = Description of Artificial Sequence: Synthetic oligonucleotide
  source 1..20: mol_type = other RNA
agtaacagtctgagtaggag

SEQ ID NO: 857 - RNA, 20 nt, synthetic construct
  misc_feature 1..20: note = Description of Artificial Sequence: Synthetic oligonucleotide
  source 1..20: mol_type = other RNA
gagtaacagtctgagtagga

SEQ ID NO: 858 - RNA, 20 nt, synthetic construct
  misc_feature 1..20: note = Description of Artificial Sequence: Synthetic oligonucleotide
  source 1..20: mol_type = other RNA
agagtaacagtctgagtagg

SEQ ID NO: 859 - RNA, 20 nt, synthetic construct
  misc_feature 1..20: note = Description of Artificial Sequence: Synthetic oligonucleotide
  source 1..20: mol_type = other RNA
cagagtaacagtctgagtag

SEQ ID NO: 860 - RNA, 20 nt, synthetic construct
  misc_feature 1..20: note = Description of Artificial Sequence: Synthetic oligonucleotide
  source 1..20: mol_type = other RNA
gtcaccagagtaacagtctg

SEQ ID NO: 861 - RNA, 20 nt, synthetic construct
  misc_feature 1..20: note = Description of Artificial Sequence: Synthetic oligonucleotide
  source 1..20: mol_type = other RNA
tgtcaccagagtaacagtct

SEQ ID NO: 862 - RNA, 20 nt, synthetic construct
  misc_feature 1..20: note = Description of Artificial Sequence: Synthetic oligonucleotide
  source 1..20: mol_type = other RNA
gtgtcaccagagtaacagtc

SEQ ID NO: 863 - RNA, 20 nt, synthetic construct
  misc_feature 1..20: note = Description of Artificial Sequence: Synthetic oligonucleotide
  source 1..20: mol_type = other RNA
tgtgtcaccagagtaacagt

SEQ ID NO: 864 - RNA, 20 nt, synthetic construct
  misc_feature 1..20: note = Description of Artificial Sequence: Synthetic oligonucleotide
  source 1..20: mol_type = other RNA
ttgtgtcaccagagtaacag

SEQ ID NO: 865 - RNA, 20 nt, synthetic construct
  misc_feature 1..20: note = Description of Artificial Sequence: Synthetic oligonucleotide
  source 1..20: mol_type = other RNA
ggttgtgtcaccagagtaac

SEQ ID NO: 866 - RNA, 20 nt, synthetic construct
  misc_feature 1..20: note = Description of Artificial Sequence: Synthetic oligonucleotide
  source 1..20: mol_type = other RNA
aggttgtgtcaccagagtaa

SEQ ID NO: 867 - RNA, 20 nt, synthetic construct
  misc_feature 1..20: note = Description of Artificial Sequence: Synthetic oligonucleotide
  source 1..20: mol_type = other RNA
caggttgtgtcaccagagta

SEQ ID NO: 868 - RNA, 20 nt, synthetic construct
  misc_feature 1..20: note = Description of Artificial Sequence: Synthetic oligonucleotide
  source 1..20: mol_type = other RNA
acaggttgtgtcaccagagt

SEQ ID NO: 869 - RNA, 20 nt, synthetic construct
  misc_feature 1..20: note = Description of Artificial Sequence: Synthetic oligonucleotide
  source 1..20: mol_type = other RNA
cacaggttgtgtcaccagag

SEQ ID NO: 870 - RNA, 20 nt, synthetic construct
  misc_feature 1..20: note = Description of Artificial Sequence: Synthetic oligonucleotide
  source 1..20: mol_type = other RNA
ccacaggttgtgtcaccaga

SEQ ID NO: 871 - RNA, 20 nt, synthetic construct
  misc_feature 1..20: note = Description of Artificial Sequence: Synthetic oligonucleotide
  source 1..20: mol_type = other RNA
accacaggttgtgtcaccag

SEQ ID NO: 872 - RNA, 20 nt, synthetic construct
  misc_feature 1..20: note = Description of Artificial Sequence: Synthetic oligonucleotide
  source 1..20: mol_type = other RNA
aaccacaggttgtgtcacca

SEQ ID NO: 873 - RNA, 20 nt, synthetic construct
  misc_feature 1..20: note = Description of Artificial Sequence: Synthetic oligonucleotide
  source 1..20: mol_type = other RNA
taaccacaggttgtgtcacc

SEQ ID NO: 874 - RNA, 20 nt, synthetic construct
  misc_feature 1..20: note = Description of Artificial Sequence: Synthetic oligonucleotide
  source 1..20: mol_type = other RNA
gtaaccacaggttgtgtcac

SEQ ID NO: 875 - RNA, 20 nt, synthetic construct
  misc_feature 1..20: note = Description of Artificial Sequence: Synthetic oligonucleotide
  source 1..20: mol_type = other RNA
agtaaccacaggttgtgtca

SEQ ID NO: 876 - RNA, 20 nt, synthetic construct
  misc_feature 1..20: note = Description of Artificial Sequence: Synthetic oligonucleotide
  source 1..20: mol_type = other RNA
cttagtaaccacaggttgtg

SEQ ID NO: 877 - RNA, 20 nt, synthetic construct
  misc_feature 1..20: note = Description of Artificial Sequence: Synthetic oligonucleotide
  source 1..20: mol_type = other RNA
ccttagtaaccacaggttgt

SEQ ID NO: 878 - RNA, 20 nt, synthetic construct
  misc_feature 1..20: note = Description of Artificial Sequence: Synthetic oligonucleotide
  source 1..20: mol_type = other RNA
tccttagtaaccacaggttg

SEQ ID NO: 879 - RNA, 20 nt, synthetic construct
  misc_feature 1..20: note = Description of Artificial Sequence: Synthetic oligonucleotide
  source 1..20: mol_type = other RNA
ttccttagtaaccacaggtt

SEQ ID NO: 880 - RNA, 20 nt, synthetic construct
  misc_feature 1..20: note = Description of Artificial Sequence: Synthetic oligonucleotide
  source 1..20: mol_type = other RNA
tttccttagtaaccacaggt

SEQ ID NO: 881 - RNA, 20 nt, synthetic construct
  misc_feature 1..20: note = Description of Artificial Sequence: Synthetic oligonucleotide
  source 1..20: mol_type = other RNA
gtttccttagtaaccacagg

SEQ ID NO: 882 - RNA, 20 nt, synthetic construct
  misc_feature 1..20: note = Description of Artificial Sequence: Synthetic oligonucleotide
  source 1..20: mol_type = other RNA
agtttccttagtaaccacag

SEQ ID NO: 883 - RNA, 20 nt, synthetic construct
  misc_feature 1..20: note = Description of Artificial Sequence: Synthetic oligonucleotide
  source 1..20: mol_type = other RNA
gcagtttccttagtaaccac

SEQ ID NO: 884 - RNA, 20 nt, synthetic construct
  misc_feature 1..20: note = Description of Artificial Sequence: Synthetic oligonucleotide
  source 1..20: mol_type = other RNA
ggcagtttccttagtaacca

SEQ ID NO: 885 - RNA, 20 nt, synthetic construct
  misc_feature 1..20: note = Description of Artificial Sequence: Synthetic oligonucleotide
  source 1..20: mol_type = other RNA
tggcagtttccttagtaacc

SEQ ID NO: 886 - RNA, 20 nt, synthetic construct
  misc_feature 1..20: note = Description of Artificial Sequence: Synthetic oligonucleotide
  source 1..20: mol_type = other RNA
atggcagtttccttagtaac

SEQ ID NO: 887 - RNA, 20 nt, synthetic construct
  misc_feature 1..20: note = Description of Artificial Sequence: Synthetic oligonucleotide
  source 1..20: mol_type = other RNA
gatggcagtttccttagtaa

SEQ ID NO: 888 - RNA, 20 nt, synthetic construct
  misc_feature 1..20: note = Description of Artificial Sequence: Synthetic oligonucleotide
  source 1..20: mol_type = other RNA
agatggcagtttccttagta

SEQ ID NO: 889 - RNA, 20 nt, synthetic construct
  misc_feature 1..20: note = Description of Artificial Sequence: Synthetic oligonucleotide
  source 1..20: mol_type = other RNA
ggagatggcagtttccttag

SEQ ID NO: 890 - RNA, 20 nt, synthetic construct
  misc_feature 1..20: note = Description of Artificial Sequence: Synthetic oligonucleotide
  source 1..20: mol_type = other RNA
tggagatggcagtttcctta

SEQ ID NO: 891 - RNA, 20 nt, synthetic construct
  misc_feature 1..20: note = Description of Artificial Sequence: Synthetic oligonucleotide
  source 1..20: mol_type = other RNA
ttggagatggcagtttcctt

SEQ ID NO: 892 - RNA, 20 nt, synthetic construct
  misc_feature 1..20: note = Description of Artificial Sequence: Synthetic oligonucleotide
  source 1..20: mol_type = other RNA
tttggagatggcagtttcct

SEQ ID NO: 893 - RNA, 20 nt, synthetic construct
  misc_feature 1..20: note = Description of Artificial Sequence: Synthetic oligonucleotide
  source 1..20: mol_type = other RNA
gtttggagatggcagtttcc

SEQ ID NO: 894 - RNA, 20 nt, synthetic construct
  misc_feature 1..20: note = Description of Artificial Sequence: Synthetic oligonucleotide
  source 1..20: mol_type = other RNA
ctagtttggagatggcagtt

SEQ ID NO: 895 - RNA, 20 nt, synthetic construct
  misc_feature 1..20: note = Description of Artificial Sequence: Synthetic oligonucleotide
  source 1..20: mol_type = other RNA
tctagtttggagatggcagt

SEQ ID NO: 896 - RNA, 20 nt, synthetic construct
  misc_feature 1..20: note = Description of Artificial Sequence: Synthetic oligonucleotide
  source 1..20: mol_type = other RNA
atttctagtttggagatggc

SEQ ID NO: 897 - RNA, 20 nt, synthetic construct
  misc_feature 1..20: note = Description of Artificial Sequence: Synthetic oligonucleotide
  source 1..20: mol_type = other RNA
tggcatttctagtttggaga

SEQ ID NO: 898 - RNA, 20 nt, synthetic construct
  misc_feature 1..20: note = Description of Artificial Sequence: Synthetic oligonucleotide
  source 1..20: mol_type = other RNA
gatggcatttctagtttgga

SEQ ID NO: 899 - RNA, 20 nt, synthetic construct
  misc_feature 1..20: note = Description of Artificial Sequence: Synthetic oligonucleotide
  source 1..20: mol_type = other RNA
agatggcatttctagtttgg

SEQ ID NO: 900 - RNA, 20 nt, synthetic construct
  misc_feature 1..20: note = Description of Artificial Sequence: Synthetic oligonucleotide
  source 1..20: mol_type = other RNA
aagatggcatttctagtttg

SEQ ID NO: 901 - RNA, 20 nt, synthetic construct
  misc_feature 1..20: note = Description of Artificial Sequence: Synthetic oligonucleotide
  source 1..20: mol_type = other RNA
aggaagatggcatttctagt

SEQ ID NO: 902 - RNA, 20 nt, synthetic construct
  misc_feature 1..20: note = Description of Artificial Sequence: Synthetic oligonucleotide
  source 1..20: mol_type = other RNA
aaggaagatggcatttctag

SEQ ID NO: 903 - RNA, 20 nt, synthetic construct
  misc_feature 1..20: note = Description of Artificial Sequence: Synthetic oligonucleotide
  source 1..20: mol_type = other RNA
caaggaagatggcatttcta

SEQ ID NO: 904 - RNA, 20 nt, synthetic construct
  misc_feature 1..20: note = Description of Artificial Sequence: Synthetic oligonucleotide
  source 1..20: mol_type = other RNA
tcaaggaagatggcatttct

SEQ ID NO: 905 - RNA, 20 nt, synthetic construct
  misc_feature 1..20: note = Description of Artificial Sequence: Synthetic oligonucleotide
  source 1..20: mol_type = other RNA
acatcaaggaagatggcatt

SEQ ID NO: 906 - RNA, 20 nt, synthetic construct
  misc_feature 1..20: note = Description of Artificial Sequence: Synthetic oligonucleotide
  source 1..20: mol_type = other RNA
caacatcaaggaagatggca

SEQ ID NO: 907 - RNA, 20 nt, synthetic construct
  misc_feature 1..20: note = Description of Artificial Sequence: Synthetic oligonucleotide
  source 1..20: mol_type = other RNA
tccaacatcaaggaagatgg

SEQ ID NO: 908 - RNA, 20 nt, synthetic construct
  misc_feature 1..20: note = Description of Artificial Sequence: Synthetic oligonucleotide
  source 1..20: mol_type = other RNA
cctccaacatcaaggaagat

SEQ ID NO: 909 - RNA, 20 nt, synthetic construct
  misc_feature 1..20: note = Description of Artificial Sequence: Synthetic oligonucleotide
  source 1..20: mol_type = other RNA
aggtacctccaacatcaagg

SEQ ID NO: 910 - RNA, 20 nt, synthetic construct
  misc_feature 1..20: note = Description of Artificial Sequence: Synthetic oligonucleotide
  source 1..20: mol_type = other RNA
caggtacctccaacatcaag

SEQ ID NO: 911 - RNA, 20 nt, synthetic construct
  misc_feature 1..20: note = Description of Artificial Sequence: Synthetic oligonucleotide
  source 1..20: mol_type = other RNA
agagcaggtacctccaacat

SEQ ID NO: 912 - RNA, 20 nt, synthetic construct
  misc_feature 1..20: note = Description of Artificial Sequence: Synthetic oligonucleotide
  source 1..20: mol_type = other RNA
cagagcaggtacctccaaca

SEQ ID NO: 913 - RNA, 20 nt, synthetic construct
  misc_feature 1..20: note = Description of Artificial Sequence: Synthetic oligonucleotide
  source 1..20: mol_type = other RNA
ccagagcaggtacctccaac

SEQ ID NO: 914 - RNA, 20 nt, synthetic construct
  misc_feature 1..20: note = Description of Artificial Sequence: Synthetic oligonucleotide
  source 1..20: mol_type = other RNA
gccagagcaggtacctccaa

SEQ ID NO: 915 - RNA, 20 nt, synthetic construct
  misc_feature 1..20: note = Description of Artificial Sequence: Synthetic oligonucleotide
  source 1..20: mol_type = other RNA
tgccagagcaggtacctcca

SEQ ID NO: 916 - RNA, 20 nt, synthetic construct
  misc_feature 1..20: note = Description of Artificial Sequence: Synthetic oligonucleotide
  source 1..20: mol_type = other RNA
ctgccagagcaggtacctcc

SEQ ID NO: 917 - RNA, 20 nt, synthetic construct
  misc_feature 1..20: note = Description of Artificial Sequence: Synthetic oligonucleotide
  source 1..20: mol_type = other RNA
tctgccagagcaggtacctc

SEQ ID NO: 918 - RNA, 20 nt, synthetic construct
  misc_feature 1..20: note = Description of Artificial Sequence: Synthetic oligonucleotide
  source 1..20: mol_type = other RNA
atctgccagagcaggtacct

SEQ ID NO: 919 - RNA, 20 nt, synthetic construct
  misc_feature 1..20: note = Description of Artificial Sequence: Synthetic oligonucleotide
  source 1..20: mol_type = other RNA
ttgaaatctgccagagcagg

SEQ ID NO: 920 - RNA, 20 nt, synthetic construct
  misc_feature 1..20: note = Description of Artificial Sequence: Synthetic oligonucleotide
  source 1..20: mol_type = other RNA
cccggttgaaatctgccaga

SEQ ID NO: 921 - RNA, 20 nt, synthetic construct
  misc_feature 1..20: note = Description of Artificial Sequence: Synthetic oligonucleotide
  source 1..20: mol_type = other RNA
gcccggttgaaatctgccag

SEQ ID NO: 922 - RNA, 20 nt, synthetic construct
  misc_feature 1..20: note = Description of Artificial Sequence: Synthetic oligonucleotide
  source 1..20: mol_type = other RNA
agcccggttgaaatctgcca

SEQ ID NO: 923 - RNA, 20 nt, synthetic construct
  misc_feature 1..20: note = Description of Artificial Sequence: Synthetic oligonucleotide
  source 1..20: mol_type = other RNA
ccaagcccggttgaaatctg

SEQ ID NO: 924 - RNA, 20 nt, synthetic construct
  misc_feature 1..20: note = Description of Artificial Sequence: Synthetic oligonucleotide
  source 1..20: mol_type = other RNA
tccaagcccggttgaaatct

SEQ ID NO: 925 - RNA, 20 nt, synthetic construct
  misc_feature 1..20: note = Description of Artificial Sequence: Synthetic oligonucleotide
  source 1..20: mol_type = other RNA
gtccaagcccggttgaaatc

SEQ ID NO: 926 - RNA, 20 nt, synthetic construct
  misc_feature 1..20: note = Description of Artificial Sequence: Synthetic oligonucleotide
  source 1..20: mol_type = other RNA
tgtccaagcccggttgaaat

SEQ ID NO: 927 - RNA, 20 nt, synthetic construct
  misc_feature 1..20: note = Description of Artificial Sequence: Synthetic oligonucleotide
  source 1..20: mol_type = other RNA
ctgtccaagcccggttgaaa

SEQ ID NO: 928 - RNA, 20 nt, synthetic construct
  misc_feature 1..20: note = Description of Artificial Sequence: Synthetic oligonucleotide
  source 1..20: mol_type = other RNA
tctgtccaagcccggttgaa

SEQ ID NO: 929 - RNA, 20 nt, synthetic construct
  misc_feature 1..20: note = Description of Artificial Sequence: Synthetic oligonucleotide
  source 1..20: mol_type = other RNA
ttctgtccaagcccggttga

SEQ ID NO: 930 - RNA, 20 nt, synthetic construct
  misc_feature 1..20: note = Description of Artificial Sequence: Synthetic oligonucleotide
  source 1..20: mol_type = other RNA
gttctgtccaagcccggttg

SEQ ID NO: 931 - RNA, 20 nt, synthetic construct
  misc_feature 1..20: note = Description of Artificial Sequence: Synthetic oligonucleotide
  source 1..20: mol_type = other RNA
agttctgtccaagcccggtt

SEQ ID NO: 932 - RNA, 20 nt, synthetic construct
  misc_feature 1..20: note = Description of Artificial Sequence: Synthetic oligonucleotide
  source 1..20: mol_type = other RNA
aagttctgtccaagcccggt

SEQ ID NO: 933 - RNA, 20 nt, synthetic construct
  misc_feature 1..20: note = Description of Artificial Sequence: Synthetic oligonucleotide
  source 1..20: mol_type = other RNA
taagttctgtccaagcccgg

SEQ ID NO: 934 - RNA, 20 nt, synthetic construct
  misc_feature 1..20: note = Description of Artificial Sequence: Synthetic oligonucleotide
  source 1..20: mol_type = other RNA
gtaagttctgtccaagcccg

SEQ ID NO: 935 - RNA, 20 nt, synthetic construct
  misc_feature 1..20: note = Description of Artificial Sequence: Synthetic oligonucleotide
  source 1..20: mol_type = other RNA
ggtaagttctgtccaagccc

SEQ ID NO: 936 - RNA, 20 nt, synthetic construct
  misc_feature 1..20: note = Description of Artificial Sequence: Synthetic oligonucleotide
  source 1..20: mol_type = other RNA
cagtcggtaagttctgtcca

SEQ ID NO: 937 - RNA, 20 nt, synthetic construct
  misc_feature 1..20: note = Description of Artificial Sequence: Synthetic oligonucleotide
  source 1..20: mol_type = other RNA
ccagtcggtaagttctgtcc

SEQ ID NO: 938 - RNA, 20 nt, synthetic construct
  misc_feature 1..20: note = Description of Artificial Sequence: Synthetic oligonucleotide
  source 1..20: mol_type = other RNA
ccaccatcaccctctgtgat

SEQ ID NO: 939 - RNA, 20 nt, synthetic construct
  misc_feature 1..20: note = Description of Artificial Sequence: Synthetic oligonucleotide
  source 1..20: mol_type = other RNA
cccaccatcaccctctgtga

SEQ ID NO: 940 - RNA, 20 nt, synthetic construct
  misc_feature 1..20: note = Description of Artificial Sequence: Synthetic oligonucleotide
  source 1..20: mol_type = other RNA
cacccaccatcaccctctgt

SEQ ID NO: 941 - RNA, 20 nt, synthetic construct
  misc_feature 1..20: note = Description of Artificial Sequence: Synthetic oligonucleotide
  source 1..20: mol_type = other RNA
tcacccaccatcaccctctg

SEQ ID NO: 942 - RNA, 20 nt, synthetic construct
  misc_feature 1..20: note = Description of Artificial Sequence: Synthetic oligonucleotide
  source 1..20: mol_type = other RNA
gtcacccaccatcaccctct

SEQ ID NO: 943 - RNA, 20 nt, synthetic construct
  misc_feature 1..20: note = Description of Artificial Sequence: Synthetic oligonucleotide
  source 1..20: mol_type = other RNA
ggtcacccaccatcaccctc

SEQ ID NO: 944 - RNA, 20 nt, synthetic construct
  misc_feature 1..20: note = Description of Artificial Sequence: Synthetic oligonucleotide
  source 1..20: mol_type = other RNA
tcaagcagagaaagccagtc

SEQ ID NO: 945 - RNA, 20 nt, synthetic construct
  misc_feature 1..20: note = Description of Artificial Sequence: Synthetic oligonucleotide
  source 1..20: mol_type = other RNA
ttgatcaagcagagaaagcc

SEQ ID NO: 946 - RNA, 25 nt, synthetic construct
  misc_feature 1..25: note = Description of Artificial Sequence: Synthetic oligonucleotide
  source 1..25: mol_type = other RNA
caaagaagatggcatttctagtttg

SEQ ID NO: 947 - RNA, 20 nt, synthetic construct
  misc_feature 1..20: note = Description of Artificial Sequence: Synthetic oligonucleotide
  source 1..20: mol_type = other RNA
gcaaagaagatggcatttct

SEQ ID NO: 948 - RNA, 20 nt, synthetic construct
  misc_feature 1..20: note = Description of Artificial Sequence: Synthetic oligonucleotide
  source 1..20: mol_type = other RNA
gcaaagaagatggcatttct

SEQ ID NO: 949 - RNA, 20 nt, synthetic construct
  misc_feature 1..20: note = Description of Artificial Sequence: Synthetic oligonucleotide
  source 1..20: mol_type = other RNA
tcaaggaagatggcatttct

SEQ ID NO: 950 - RNA, 20 nt, synthetic construct
  misc_feature 1..20: note = Description of Artificial Sequence: Synthetic oligonucleotide
  source 1..20: mol_type = other RNA
tcaaggaagatggcatttct

SEQ ID NO: 951 - RNA, 20 nt, synthetic construct
  misc_feature 1..20: note = Description of Artificial Sequence: Synthetic oligonucleotide
  source 1..20: mol_type = other RNA
tcaaggaagatggcatttct

SEQ ID NO: 952 - RNA, 20 nt, synthetic construct
  misc_feature 1..20: note = Description of Artificial Sequence: Synthetic oligonucleotide
  source 1..20: mol_type = other RNA
tcaaggaagatggcatttct

SEQ ID NO: 953 - RNA, 20 nt, synthetic construct
  misc_feature 1..20: note = Description of Artificial Sequence: Synthetic oligonucleotide
  source 1..20: mol_type = other RNA
tcaaggaagatggcatttct

SEQ ID NO: 954 - RNA, 20 nt, synthetic construct
  misc_feature 1..20: note = Description of Artificial Sequence: Synthetic oligonucleotide
  source 1..20: mol_type = other RNA
tcaaggaagatggcatttct

SEQ ID NO: 955 - RNA, 20 nt, synthetic construct
  misc_feature 1..20: note = Description of Artificial Sequence: Synthetic oligonucleotide
  source 1..20: mol_type = other RNA
tcaaggaagatggcatttct

SEQ ID NO: 956 - RNA, 20 nt, synthetic construct
  misc_feature 1..20: note = Description of Artificial Sequence: Synthetic oligonucleotide
  source 1..20: mol_type = other RNA
tcaaggaagatggcatttct

SEQ ID NO: 957 - RNA, 20 nt, synthetic construct
  misc_feature 1..20: note = Description of Artificial Sequence: Synthetic oligonucleotide
  source 1..20: mol_type = other RNA
tcaaggaagatggcatttct

SEQ ID NO: 958 - RNA, 20 nt, synthetic construct
  misc_feature 1..20: note = Description of Artificial Sequence: Synthetic oligonucleotide
  source 1..20: mol_type = other RNA
tcaaggaagatggcatttct

SEQ ID NO: 959 - RNA, 20 nt, synthetic construct
  misc_feature 1..20: note = Description of Artificial Sequence: Synthetic oligonucleotide
  source 1..20: mol_type = other RNA
tcaaggaagatggcatttct

SEQ ID NO: 960 - RNA, 20 nt, synthetic construct
  misc_feature 1..20: note = Description of Artificial Sequence: Synthetic oligonucleotide
  source 1..20: mol_type = other RNA
tcaaggaagatggcatttct

SEQ ID NO: 961 - RNA, 20 nt, synthetic construct
  misc_feature 1..20: note = Description of Artificial Sequence: Synthetic oligonucleotide
  source 1..20: mol_type = other RNA
tcaaggaagatggcatttct

SEQ ID NO: 962 - RNA, 20 nt, synthetic construct
  misc_feature 1..20: note = Description of Artificial Sequence: Synthetic oligonucleotide
  source 1..20: mol_type = other RNA
tcaaggaagatggcatttct

SEQ ID NO: 963 - RNA, 20 nt, synthetic construct
  misc_feature 1..20: note = Description of Artificial Sequence: Synthetic oligonucleotide
  source 1..20: mol_type = other RNA
tcaaggaagatggcatttct

SEQ ID NO: 964 - RNA, 20 nt, synthetic construct
  misc_feature 1..20: note = Description of Artificial Sequence: Synthetic oligonucleotide
  source 1..20: mol_type = other RNA
tcaaggaagatggcatttct

SEQ ID NO: 965 - RNA, 20 nt, synthetic construct
  misc_feature 1..20: note = Description of Artificial Sequence: Synthetic oligonucleotide
  source 1..20: mol_type = other RNA
tcaaggaagatggcatttct

SEQ ID NO: 966 - RNA, 20 nt, synthetic construct
  misc_feature 1..20: note = Description of Artificial Sequence: Synthetic oligonucleotide
  source 1..20: mol_type = other RNA
tcaaggaagatggcatttct

SEQ ID NO: 967 - RNA, 20 nt, synthetic construct
  misc_feature 1..20: note = Description of Artificial Sequence: Synthetic oligonucleotide
  source 1..20: mol_type = other RNA
tcaaggaagatggcatttct

SEQ ID NO: 968 - RNA, 20 nt, synthetic construct
  misc_feature 1..20: note = Description of Artificial Sequence: Synthetic oligonucleotide
  source 1..20: mol_type = other RNA
tcaaggaagatggcatttct

SEQ ID NO: 969 - RNA, 20 nt, synthetic construct
  misc_feature 1..20: note = Description of Artificial Sequence: Synthetic oligonucleotide
  source 1..20: mol_type = other RNA
tcaaggaagatggcatttct

SEQ ID NO: 970 - RNA, 20 nt, synthetic construct
  misc_feature 1..20: note = Description of Artificial Sequence: Synthetic oligonucleotide
  source 1..20: mol_type = other RNA
tcaaggaagatggcatttct

SEQ ID NO: 971 - RNA, 20 nt, synthetic construct
  misc_feature 1..20: note = Description of Artificial Sequence: Synthetic oligonucleotide
  source 1..20: mol_type = other RNA
tcaaggaagatggcatttct

SEQ ID NO: 972 - RNA, 20 nt, synthetic construct
  misc_feature 1..20: note = Description of Artificial Sequence: Synthetic oligonucleotide
  source 1..20: mol_type = other RNA
tcaaggaagatggcatttct

SEQ ID NO: 973 - RNA, 20 nt, synthetic construct
  misc_feature 1..20: note = Description of Artificial Sequence: Synthetic oligonucleotide
  source 1..20: mol_type = other RNA
tcaaggaagatggcatttct

SEQ ID NO: 974 - RNA, 20 nt, synthetic construct
  misc_feature 1..20: note = Description of Artificial Sequence: Synthetic oligonucleotide
  source 1..20: mol_type = other RNA
tcaaggaagatggcatttct

SEQ ID NO: 975 - RNA, 20 nt, synthetic construct
  misc_feature 1..20: note = Description of Artificial Sequence: Synthetic oligonucleotide
  source 1..20: mol_type = other RNA
tcaaggaagatggcatttct

SEQ ID NO: 976 - RNA, 20 nt, synthetic construct
  misc_feature 1..20: note = Description of Artificial Sequence: Synthetic oligonucleotide
  source 1..20: mol_type = other RNA
tcaaggaagatggcatttct

SEQ ID NO: 977 - RNA, 20 nt, synthetic construct
  misc_feature 1..20: note = Description of Artificial Sequence: Synthetic oligonucleotide
  source 1..20: mol_type = other RNA
tcaaggaagatggcatttct

SEQ ID NO: 978 - RNA, 20 nt, synthetic construct
  misc_feature 1..20: note = Description of Artificial Sequence: Synthetic oligonucleotide
  source 1..20: mol_type = other RNA
ggccaaacctcggcttacct

SEQ ID NO: 979 - RNA, 20 nt, synthetic construct
  misc_feature 1..20: note = Description of Artificial Sequence: Synthetic oligonucleotide
  source 1..20: mol_type = other RNA
ggccaaacctcggcttacct

SEQ ID NO: 980 - RNA, 20 nt, synthetic construct
  misc_feature 1..20: note = Description of Artificial Sequence: Synthetic oligonucleotide
  source 1..20: mol_type = other RNA
ggccaaacctcggcttacct

SEQ ID NO: 981 - RNA, 20 nt, synthetic construct
  misc_feature 1..20: note = Description of Artificial Sequence: Synthetic oligonucleotide
  source 1..20: mol_type = other RNA
ggccaaacctcggcttacct

SEQ ID NO: 982 - RNA, 20 nt, synthetic construct
  misc_feature 1..20: note = Description of Artificial Sequence: Synthetic oligonucleotide
  source 1..20: mol_type = other RNA
ggccaaacctcggcttacct

SEQ ID NO: 983 - RNA, 20 nt, synthetic construct
  misc_feature 1..20: note = Description of Artificial Sequence: Synthetic oligonucleotide
  source 1..20: mol_type = other RNA
ggccaaacctcggcttacct

SEQ ID NO: 984 - RNA, 20 nt, synthetic construct
  misc_feature 1..20: note = Description of Artificial Sequence: Synthetic oligonucleotide
  source 1..20: mol_type = other RNA
ggccaaacctcggcttacct

SEQ ID NO: 985 - RNA, 20 nt, synthetic construct
  misc_feature 1..20: note = Description of Artificial Sequence: Synthetic oligonucleotide
  source 1..20: mol_type = other RNA
ggccaaacctcggcttacct

SEQ ID NO: 986 - RNA, 20 nt, synthetic construct
  misc_feature 1..20: note = Description of Artificial Sequence: Synthetic oligonucleotide
  source 1..20: mol_type = other RNA
tcaaggaagatggcatttct

SEQ ID NO: 987 - RNA, 20 nt, synthetic construct
  misc_feature 1..20: note = Description of Artificial Sequence: Synthetic oligonucleotide
  source 1..20: mol_type = other RNA
tcaaggaagatggcatttct

SEQ ID NO: 988 - RNA, 20 nt, synthetic construct
  misc_feature 1..20: note = Description of Artificial Sequence: Synthetic oligonucleotide
  source 1..20: mol_type = other RNA
tcaaggaagatggcatttct

SEQ ID NO: 989 - RNA, 20 nt, synthetic construct
  misc_feature 1..20: note = Description of Artificial Sequence: Synthetic oligonucleotide
  source 1..20: mol_type = other RNA
tcaaggaagatggcatttct

SEQ ID NO: 990 - RNA, 20 nt, synthetic construct
  misc_feature 1..20: note = Description of Artificial Sequence: Synthetic oligonucleotide
  source 1..20: mol_type = other RNA
tcaaggaagatggcatttct

SEQ ID NO: 991 - RNA, 20 nt, synthetic construct
  misc_feature 1..20: note = Description of Artificial Sequence: Synthetic oligonucleotide
  source 1..20: mol_type = other RNA
tcaaggaagatggcatttct

SEQ ID NO: 992 - RNA, 20 nt, synthetic construct
  misc_feature 1..20: note = Description of Artificial Sequence: Synthetic oligonucleotide
  source 1..20: mol_type = other RNA
tcaaggaagatggcatttct

SEQ ID NO: 993 - RNA, 20 nt, synthetic construct
  misc_feature 1..20: note = Description of Artificial Sequence: Synthetic oligonucleotide
  source 1..20: mol_type = other RNA
tcaaggaagatggcatttct

SEQ ID NO: 994 - DNA, 20 bp, synthetic construct
  misc_feature 1..20: note = Description of Artificial Sequence: Synthetic oligonucleotide
  source 1..20: mol_type = other DNA
ggccaaacctcggcttacct

SEQ ID NO: 995 - RNA, 20 nt, synthetic construct
  misc_feature 1..20: note = Description of Artificial Sequence: Synthetic oligonucleotide
  source 1..20: mol_type = other RNA
ggccaaacctcggcttacct

SEQ ID NO: 996 - DNA, 20 bp, synthetic construct
  misc_feature 1..20: note = Description of Artificial Sequence: Synthetic oligonucleotide
  source 1..20: mol_type = other DNA
ggccaaacctcggcttacct

SEQ ID NO: 997 - DNA, 20 bp, synthetic construct
  misc_feature 1..20: note = Description of Artificial Sequence: Synthetic oligonucleotide
  source 1..20: mol_type = other DNA
ggccaaacctcggcttacct

SEQ ID NO: 998 - DNA, 20 bp, synthetic construct
  misc_feature 1..20: note = Synthetic oligonucleotide
  modified_base 10: mod_base = OTHER; note = uracil
  source 1..20: mol_type = other DNA
ggccaaacctcggcttacct

SEQ ID NO: 999 - DNA, 20 bp, synthetic construct
  misc_feature 1..20: note = Synthetic oligonucleotide
  modified_base 20: mod_base = OTHER; note = uracil
  source 1..20: mol_type = other DNA
ggccaaacctcggcttacct

SEQ ID NO: 1000 - DNA, 20 bp, synthetic construct
  misc_feature 1..20: note = Synthetic oligonucleotide
  modified_base 10: mod_base = OTHER; note = uracil
  modified_base 16: mod_base = OTHER; note = uracil
  modified_base 20: mod_base = OTHER; note = uracil
  source 1..20: mol_type = other DNA
ggccaaacctcggcttacct

SEQ ID NO: 1001 - DNA, 20 bp, synthetic construct
  misc_feature 1..20: note = Synthetic oligonucleotide
  modified_base 15: mod_base = OTHER; note = uracil
  modified_base 20: mod_base = OTHER; note = uracil
  source 1..20: mol_type = other DNA
ggccaaacctcggcttacct

SEQ ID NO: 1002 - DNA, 20 bp, synthetic construct
  misc_feature 1..20: note = Synthetic oligonucleotide
  modified_base 16: mod_base = OTHER; note = uracil
  modified_base 20: mod_base = OTHER; note = uracil
  source 1..20: mol_type = other DNA
ggccaaacctcggcttacct

SEQ ID NO: 1003 - RNA, 20 nt, synthetic construct
  misc_feature 1..20: note = Description of Artificial Sequence: Synthetic oligonucleotide
  source 1..20: mol_type = other RNA
ggccaaacctcggcttacct

SEQ ID NO: 1004 - DNA, 20 bp, synthetic construct
  misc_feature 1..20: note = Synthetic oligonucleotide
  modified_base 15: mod_base = OTHER; note = uracil
  modified_base 20: mod_base = OTHER; note = uracil
  source 1..20: mol_type = other DNA
ggccaaacctcggcttacct

SEQ ID NO: 1005 - DNA, 20 bp, synthetic construct
  misc_feature 1..20: note = Synthetic oligonucleotide
  modified_base 16: mod_base = OTHER; note = uracil
  modified_base 20: mod_base = OTHER; note = uracil
  source 1..20: mol_type = other DNA
ggccaaacctcggcttacct

SEQ ID NO: 1006 - DNA, 20 bp, synthetic construct
  misc_feature 1..20: note = Synthetic oligonucleotide
  modified_base 10: mod_base = OTHER; note = uracil
  modified_base 20: mod_base = OTHER; note = uracil
  source 1..20: mol_type = other DNA
ggccaaacctcggcttacct

SEQ ID NO: 1007 - DNA, 20 bp, synthetic construct
  misc_feature 1..20: note = Synthetic oligonucleotide
  modified_base 10: mod_base = OTHER; note = uracil
  source 1..20: mol_type = other DNA
ggccaaacctcggcttacct

SEQ ID NO: 1008 - DNA, 20 bp, synthetic construct
  misc_feature 1..20: note = Synthetic oligonucleotide
  modified_base 20: mod_base = OTHER; note = uracil
  source 1..20: mol_type = other DNA
ggccaaacctcggcttacct

SEQ ID NO: 1009 - DNA, 20 bp, synthetic construct
  misc_feature 1..20: note = Synthetic oligonucleotide
  modified_base 10: mod_base = OTHER; note = uracil
  modified_base 16: mod_base = OTHER; note = uracil
  modified_base 20: mod_base = OTHER; note = uracil
  source 1..20: mol_type = other DNA
ggccaaacctcggcttacct

SEQ ID NO: 1010 - DNA, 20 bp, synthetic construct
  misc_feature 1..20: note = Synthetic oligonucleotide
  modified_base 15: mod_base = OTHER; note = uracil
  modified_base 20: mod_base = OTHER; note = uracil
  source 1..20: mol_type = other DNA
ggccaaacctcggcttacct

SEQ ID NO: 1011 - DNA, 20 bp, synthetic construct
  misc_feature 1..20: note = Synthetic oligonucleotide
  modified_base 16: mod_base = OTHER; note = uracil
  modified_base 20: mod_base = OTHER; note = uracil
  source 1..20: mol_type = other DNA
ggccaaacctcggcttacct

SEQ ID NO: 1012 - RNA, 20 nt, synthetic construct
  misc_feature 1..20: note = Description of Artificial Sequence: Synthetic oligonucleotide
  source 1..20: mol_type = other RNA
ggccaaacctcggcttacct

SEQ ID NO: 1013 - DNA, 20 bp, synthetic construct
  misc_feature 1..20: note = Synthetic oligonucleotide
  modified_base 15: mod_base = OTHER; note = uracil
  modified_base 20: mod_base = OTHER; note = uracil
  source 1..20: mol_type = other DNA
ggccaaacctcggcttacct

SEQ ID NO: 1014 - DNA, 20 bp, synthetic construct
  misc_feature 1..20: note = Synthetic oligonucleotide
  modified_base 16: mod_base = OTHER; note = uracil
  modified_base 20: mod_base = OTHER; note = uracil
  source 1..20: mol_type = other DNA
ggccaaacctcggcttacct

SEQ ID NO: 1015 - DNA, 20 bp, synthetic construct
  misc_feature 1..20: note = Synthetic oligonucleotide
  modified_base 10: mod_base = OTHER; note = uracil
  modified_base 20: mod_base = OTHER; note = uracil
  source 1..20: mol_type = other DNA
ggccaaacctcggcttacct

SEQ ID NO: 1016 - DNA, 20 bp, synthetic construct
  misc_feature 1..20: note = Synthetic oligonucleotide
  modified_base 10: mod_base = OTHER; note = uracil
  modified_base 15: mod_base = OTHER; note = uracil
  modified_base 20: mod_base = OTHER; note = uracil
  source 1..20: mol_type = other DNA
ggccaaacctcggcttacct

SEQ ID NO: 1017 - RNA, 20 nt, synthetic construct
  misc_feature 1..20: note = Description of Artificial Sequence: Synthetic oligonucleotide
  source 1..20: mol_type = other RNA
ggccaaacctcggcttacct

SEQ ID NO: 1018 - RNA, 20 nt, synthetic construct
  misc_feature 1..20: note = Description of Artificial Sequence: Synthetic oligonucleotide
  source 1..20: mol_type = other RNA
ggccaaacctcggcttacct

SEQ ID NO: 1019 - RNA, 20 nt, synthetic construct
  misc_feature 1..20: note = Description of Artificial Sequence: Synthetic oligonucleotide
  source 1..20: mol_type = other RNA
ggccaaacctcggcttacct

SEQ ID NO: 1020 - RNA, 20 nt, synthetic construct
  misc_feature 1..20: note = Description of Artificial Sequence: Synthetic oligonucleotide
  source 1..20: mol_type = other RNA
ggccaaacctcggcttacct

SEQ ID NO: 1021 - RNA, 20 nt, synthetic construct
  misc_feature 1..20: note = Description of Artificial Sequence: Synthetic oligonucleotide
  source 1..20: mol_type = other RNA
ggccaaacctcggcttacct

SEQ ID NO: 1022 - RNA, 20 nt, synthetic construct
  misc_feature 1..20: note = Description of Artificial Sequence: Synthetic oligonucleotide
  source 1..20: mol_type = other RNA
ggccaaacctcggcttacct

SEQ ID NO: 1023 - RNA, 20 nt, synthetic construct
  misc_feature 1..20: note = Description of Artificial Sequence: Synthetic oligonucleotide
  source 1..20: mol_type = other RNA
ggccaaacctcggcttacct

SEQ ID NO: 1024 - RNA, 20 nt, synthetic construct
  misc_feature 1..20: note = Description of Artificial Sequence: Synthetic oligonucleotide
  source 1..20: mol_type = other RNA
ggccaaacctcggcttacct

SEQ ID NO: 1025 - RNA, 20 nt, synthetic construct
  misc_feature 1..20: note = Description of Artificial Sequence: Synthetic oligonucleotide
  source 1..20: mol_type = other RNA
ggccaaacctcggcttacct

SEQ ID NO: 1026 - RNA, 20 nt, synthetic construct
  misc_feature 1..20: note = Description of Artificial Sequence: Synthetic oligonucleotide
  source 1..20: mol_type = other RNA
ggccaaacctcggcttacct

SEQ ID NO: 1027 - RNA, 20 nt, synthetic construct
  misc_feature 1..20: note = Description of Artificial Sequence: Synthetic oligonucleotide
  source 1..20: mol_type = other RNA
ggccaaacctcggcttacct

SEQ ID NO: 1028 - RNA, 25 nt, synthetic construct
  misc_feature 1..25: note = Description of Artificial Sequence: Synthetic oligonucleotide
  source 1..25: mol_type = other RNA
ggccaaacctcggcttacctgaaat

SEQ ID NO: 1029 - DNA, 20 bp, synthetic construct
  misc_feature 1..20: note = Synthetic oligonucleotide
  modified_base 10: mod_base = OTHER; note = uracil
  modified_base 15: mod_base = OTHER; note = uracil
  modified_base 20: mod_base = OTHER; note = uracil
  source 1..20: mol_type = other DNA
ggccaaacctcggcttacct

SEQ ID NO: 1030 - DNA, 20 bp, synthetic construct
  misc_feature 1..20: note = Description of Artificial Sequence: Synthetic oligonucleotide
  source 1..20: mol_type = other DNA
tcaaggaagatggcatttct

SEQ ID NO: 1031 - RNA, 20 nt, synthetic construct
  misc_feature 1..20: note = Description of Artificial Sequence: Synthetic oligonucleotide
  source 1..20: mol_type = other RNA
tcaaggaagatggcatttct

SEQ ID NO: 1032 - DNA, 20 bp, synthetic construct
  misc_feature 1..20: note = Description of Artificial Sequence: Synthetic oligonucleotide
  source 1..20: mol_type = other DNA
tcaaggaagatggcatttct

SEQ ID NO: 1033 - DNA, 20 bp, synthetic construct
  misc_feature 1..20: note = Description of Artificial Sequence: Synthetic oligonucleotide
  source 1..20: mol_type = other DNA
tcaaggaagatggcatttct

SEQ ID NO: 1034 - DNA, 20 bp, synthetic construct
  misc_feature 1..20: note = Synthetic oligonucleotide
  modified_base 11: mod_base = OTHER; note = uracil
  source 1..20: mol_type = other DNA
tcaaggaagatggcatttct

SEQ ID NO: 1035 - DNA, 20 bp, synthetic construct
  misc_feature 1..20: note = Synthetic oligonucleotide
  modified_base 1: mod_base = OTHER; note = uracil
  modified_base 17..18: mod_base = OTHER; note = uracil
  modified_base 20: mod_base = OTHER; note = uracil
  source 1..20: mol_type = other DNA
tcaaggaagatggcatttct

SEQ ID NO: 1036 - DNA, 20 bp, synthetic construct
  misc_feature 1..20: note = Synthetic oligonucleotide
  modified_base 16: mod_base = OTHER; note = uracil
  modified_base 18: mod_base = OTHER; note = uracil
  modified_base 20: mod_base = OTHER; note = uracil
  source 1..20: mol_type = other DNA
tcaaggaagatggcatttct

SEQ ID NO: 1037 - DNA, 20 bp, synthetic construct
  misc_feature 1..20: note = Synthetic oligonucleotide
  modified_base 1: mod_base = OTHER; note = uracil
  modified_base 11: mod_base = OTHER; note = uracil
  modified_base 17: mod_base = OTHER; note = uracil
  modified_base 20: mod_base = OTHER; note = uracil
  source 1..20: mol_type = other DNA
tcaaggaagatggcatttct

SEQ ID NO: 1038 - DNA, 20 bp, synthetic construct
  misc_feature 1..20: note = Synthetic oligonucleotide
  modified_base 16..17: mod_base = OTHER; note = uracil
  modified_base 20: mod_base = OTHER; note = uracil
  source 1..20: mol_type = other DNA
tcaaggaagatggcatttct

SEQ ID NO: 1039 - DNA, 20 bp, synthetic construct
  misc_feature 1..20: note = Synthetic oligonucleotide
  modified_base 11: mod_base = OTHER; note = uracil
  modified_base 16: mod_base = OTHER; note = uracil
  modified_base 20: mod_base = OTHER; note = uracil
  source 1..20: mol_type = other DNA
tcaaggaagatggcatttct

SEQ ID NO: 1040 - DNA, 20 bp, synthetic construct
  misc_feature 1..20: note = Synthetic oligonucleotide
  modified_base 20: mod_base = OTHER; note = uracil
  source 1..20: mol_type = other DNA
tcaaggaagatggcatttct

SEQ ID NO: 1041 - DNA, 20 bp, synthetic construct
  misc_feature 1..20: note = Synthetic oligonucleotide
  modified_base 16: mod_base = OTHER; note = uracil
  modified_base 20: mod_base = OTHER; note = uracil
  source 1..20: mol_type = other DNA
tcaaggaagatggcatttct

SEQ ID NO: 1042 - DNA, 20 bp, synthetic construct
  misc_feature 1..20: note = Synthetic oligonucleotide
  modified_base 1: mod_base = OTHER; note = uracil
  modified_base 11: mod_base = OTHER; note = uracil
  modified_base 20: mod_base = OTHER; note = uracil
  source 1..20: mol_type = other DNA
tcaaggaagatggcatttct

SEQ ID NO: 1043 - DNA, 20 bp, synthetic construct
  misc_feature 1..20: note = Synthetic oligonucleotide
  modified_base 20: mod_base = OTHER; note = uracil
  source 1..20: mol_type = other DNA
tcaaggaagatggcatttct

SEQ ID NO: 1044 - DNA, 20 bp, synthetic construct
  misc_feature 1..20: note = Synthetic oligonucleotide
  modified_base 11: mod_base = OTHER; note = uracil
  source 1..20: mol_type = other DNA
tcaaggaagatggcatttct

SEQ ID NO: 1045 - DNA, 20 bp, synthetic construct
  misc_feature 1..20: note = Synthetic oligonucleotide
  modified_base 1: mod_base = OTHER; note = uracil
  modified_base 17..18: mod_base = OTHER; note = uracil
  modified_base 20: mod_base = OTHER; note = uracil
  source 1..20: mol_type = other DNA
tcaaggaagatggcatttct

SEQ ID NO: 1046 - DNA, 20 bp, synthetic construct
  misc_feature 1..20: note = Synthetic oligonucleotide
  modified_base 16: mod_base = OTHER; note = uracil
  modified_base 18: mod_base = OTHER; note = uracil
  modified_base 20: mod_base = OTHER; note = uracil
  source 1..20: mol_type = other DNA
tcaaggaagatggcatttct

SEQ ID NO: 1047 - DNA, 20 bp, synthetic construct
  misc_feature 1..20: note = Synthetic oligonucleotide
  modified_base 1: mod_base = OTHER; note = uracil
  modified_base 11: mod_base = OTHER; note = uracil
  modified_base 17: mod_base = OTHER; note = uracil
  modified_base 20: mod_base = OTHER; note = uracil
  source 1..20: mol_type = other DNA
tcaaggaagatggcatttct

SEQ ID NO: 1048 - DNA, 20 bp, synthetic construct
  misc_feature 1..20: note = Synthetic oligonucleotide
  modified_base 16..17: mod_base = OTHER; note = uracil
  modified_base 20: mod_base = OTHER; note = uracil
  source 1..20: mol_type = other DNA
tcaaggaagatggcatttct

SEQ ID NO: 1049 - DNA, 20 bp, synthetic construct
  misc_feature 1..20: note = Synthetic oligonucleotide
  modified_base 11: mod_base = OTHER; note = uracil
  modified_base 16: mod_base = OTHER; note = uracil
  modified_base 20: mod_base = OTHER; note = uracil
  source 1..20: mol_type = other DNA
tcaaggaagatggcatttct

SEQ ID NO: 1050 - DNA, 20 bp, synthetic construct
  misc_feature 1..20: note = Synthetic oligonucleotide
  modified_base 20: mod_base = OTHER; note = uracil
  source 1..20: mol_type = other DNA
tcaaggaagatggcatttct

SEQ ID NO: 1051 - DNA, 20 bp, synthetic construct
  misc_feature 1..20: note = Synthetic oligonucleotide
  modified_base 16: mod_base = OTHER; note = uracil
  modified_base 20: mod_base = OTHER; note = uracil
  source 1..20: mol_type = other DNA
tcaaggaagatggcatttct

SEQ ID NO: 1052 - DNA, 20 bp, synthetic construct
  misc_feature 1..20: note = Synthetic oligonucleotide
  modified_base 1: mod_base = OTHER; note = uracil
  modified_base 11: mod_base = OTHER; note = uracil
  modified_base 20: mod_base = OTHER; note = uracil
  source 1..20: mol_type = other DNA
tcaaggaagatggcatttct

SEQ ID NO: 1053 - DNA, 20 bp, synthetic construct
  misc_feature 1..20: note = Synthetic oligonucleotide
  modified_base 20: mod_base = OTHER; note = uracil
  source 1..20: mol_type = other DNA
tcaaggaagatggcatttct

SEQ ID NO: 1054 - RNA, 20 nt, synthetic construct
  misc_feature 1..20: note = Description of Artificial Sequence: Synthetic oligonucleotide
  source 1..20: mol_type = other RNA
tcaaggaagatggcatttct

SEQ ID NO: 1055 - RNA, 20 nt, synthetic construct
  misc_feature 1..20: note = Description of Artificial Sequence: Synthetic oligonucleotide
  source 1..20: mol_type = other RNA
tcaaggaagatggcatttct

SEQ ID NO: 1056 - RNA, 20 nt, synthetic construct
  misc_feature 1..20: note = Description of Artificial Sequence: Synthetic oligonucleotide
  source 1..20: mol_type = other RNA
tcaaggaagatggcatttct

SEQ ID NO: 1057 - RNA, 20 nt, synthetic construct
  misc_feature 1..20: note = Description of Artificial Sequence: Synthetic oligonucleotide
  source 1..20: mol_type = other RNA
tcaaggaagatggcatttct

SEQ ID NO: 1058 - RNA, 20 nt, synthetic construct
  misc_feature 1..20: note = Description of Artificial Sequence: Synthetic oligonucleotide
  source 1..20: mol_type = other RNA
tcaaggaagatggcatttct

SEQ ID NO: 1059 - RNA, 20 nt, synthetic construct
  misc_feature 1..20: note = Description of Artificial Sequence: Synthetic oligonucleotide
  source 1..20: mol_type = other RNA
tcaaggaagatggcatttct

SEQ ID NO: 1060 - RNA, 20 nt, synthetic construct
  misc_feature 1..20: note = Description of Artificial Sequence: Synthetic oligonucleotide
  source 1..20: mol_type = other RNA
tcaaggaagatggcatttct

SEQ ID NO: 1061 - RNA, 20 nt, synthetic construct
  misc_feature 1..20: note = Description of Artificial Sequence: Synthetic oligonucleotide
  source 1..20: mol_type = other RNA
tcaaggaagatggcatttct

SEQ ID NO: 1062 - RNA, 20 nt, synthetic construct
  misc_feature 1..20: note = Description of Artificial Sequence: Synthetic oligonucleotide
  source 1..20: mol_type = other RNA
tcaaggaagatggcatttct

SEQ ID NO: 1063 - RNA, 20 nt, synthetic construct
  misc_feature 1..20: note = Description of Artificial Sequence: Synthetic oligonucleotide
  source 1..20: mol_type = other RNA
tcaaggaagatggcatttct

SEQ ID NO: 1064 - RNA, 20 nt, synthetic construct
  misc_feature 1..20: note = Description of Artificial Sequence: Synthetic oligonucleotide
  source 1..20: mol_type = other RNA
agaaatgccatcttccttga

SEQ ID NO: 1065 - RNA, 20 nt, synthetic construct
  misc_feature 1..20: note = Description of Artificial Sequence: Synthetic oligonucleotide
  source 1..20: mol_type = other RNA
tcaaggaagatggcatttct

SEQ ID NO: 1066 - RNA, 20 nt, synthetic construct
  misc_feature 1..20: note = Description of Artificial Sequence: Synthetic oligonucleotide
  source 1..20: mol_type = other RNA
tcaaggaagatggcatttct

SEQ ID NO: 1067 - RNA, 20 nt, synthetic construct
  misc_feature 1..20: note = Description of Artificial Sequence: Synthetic oligonucleotide
  source 1..20: mol_type = other RNA
tcaaggaagatggcatttct

SEQ ID NO: 1068 - RNA, 20 nt, synthetic construct
  misc_feature 1..20: note = Description of Artificial Sequence: Synthetic oligonucleotide
  source 1..20: mol_type = other RNA
tcaaggaagatggcatttct

SEQ ID NO: 1069 - RNA, 20 nt, synthetic construct
  misc_feature 1..20: note = Description of Artificial Sequence: Synthetic oligonucleotide
  source 1..20: mol_type = other RNA
tcaaggaagatggcatttct

SEQ ID NO: 1070 - RNA, 20 nt, synthetic construct
  misc_feature 1..20: note = Description of Artificial Sequence: Synthetic oligonucleotide
  source 1..20: mol_type = other RNA
tcaaggaagatggcatttct

SEQ ID NO: 1071 - RNA, 20 nt, synthetic construct
  misc_feature 1..20: note = Description of Artificial Sequence: Synthetic oligonucleotide
  source 1..20: mol_type = other RNA
tcaaggaagatggcatttct

SEQ ID NO: 1072 - RNA, 20 nt, synthetic construct
  misc_feature 1..20: note = Description of Artificial Sequence: Synthetic oligonucleotide
  source 1..20: mol_type = other RNA
tcaaggaagatggcatttct

SEQ ID NO: 1073 - RNA, 20 nt, synthetic construct
  misc_feature 1..20: note = Description of Artificial Sequence: Synthetic oligonucleotide
  source 1..20: mol_type = other RNA
tcaaggaagatggcatttct

SEQ ID NO: 1074 - RNA, 20 nt, synthetic construct
  misc_feature 1..20: note = Description of Artificial Sequence: Synthetic oligonucleotide
  source 1..20: mol_type = other RNA
tcaaggaagatggcatttct

SEQ ID NO: 1075 - RNA, 20 nt, synthetic construct
  misc_feature 1..20: note = Description of Artificial Sequence: Synthetic oligonucleotide
  source 1..20: mol_type = other RNA
tcaaggaagatggcatttct

SEQ ID NO: 1076 - RNA, 20 nt, synthetic construct
  misc_feature 1..20: note = Description of Artificial Sequence: Synthetic oligonucleotide
  source 1..20: mol_type = other RNA
tcaaggaagatggcatttct

SEQ ID NO: 1077 - RNA, 20 nt, synthetic construct
  misc_feature 1..20: note = Description of Artificial Sequence: Synthetic oligonucleotide
  source 1..20: mol_type = other RNA
tcaaggaagatggcatttct

SEQ ID NO: 1078 - RNA, 20 nt, synthetic construct
  misc_feature 1..20: note = Description of Artificial Sequence: Synthetic oligonucleotide
  source 1..20: mol_type = other RNA
tcaaggaagatggcatttct

SEQ ID NO: 1079 - RNA, 20 nt, synthetic construct
  misc_feature 1..20: note = Description of Artificial Sequence: Synthetic oligonucleotide
  source 1..20: mol_type = other RNA
tcaaggaagatggcatttct

SEQ ID NO: 1080 - RNA, 20 nt, synthetic construct
  misc_feature 1..20: note = Description of Artificial Sequence: Synthetic oligonucleotide
  source 1..20: mol_type = other RNA
tcaaggaagatggcatttct

SEQ ID NO: 1081 - RNA, 20 nt, synthetic construct
  misc_feature 1..20: note = Description of Artificial Sequence: Synthetic oligonucleotide
  source 1..20: mol_type = other RNA
tcaaggaagatggcatttct

SEQ ID NO: 1082 - RNA, 20 nt, synthetic construct
  misc_feature 1..20: note = Description of Artificial Sequence: Synthetic oligonucleotide
  source 1..20: mol_type = other RNA
tcaaggaagatggcatttct

SEQ ID NO: 1083 - RNA, 20 nt, synthetic construct
  misc_feature 1..20: note = Description of Artificial Sequence: Synthetic oligonucleotide
  source 1..20: mol_type = other RNA
tcaaggaagatggcatttct

SEQ ID NO: 1084 - RNA, 20 nt, synthetic construct
  misc_feature 1..20: note = Description of Artificial Sequence: Synthetic oligonucleotide
  source 1..20: mol_type = other RNA
tcaaggaagatggcatttct

SEQ ID NO: 1085 - RNA, 20 nt, synthetic construct
  misc_feature 1..20: note = Description of Artificial Sequence: Synthetic oligonucleotide
  source 1..20: mol_type = other RNA
tcaaggaagatggcatttct

SEQ ID NO: 1086 - RNA, 20 nt, synthetic construct
  misc_feature 1..20: note = Description of Artificial Sequence: Synthetic oligonucleotide
  source 1..20: mol_type = other RNA
tcaaggaagatggcatttct

SEQ ID NO: 1087 - RNA, 20 nt, synthetic construct
  misc_feature 1..20: note = Description of Artificial Sequence: Synthetic oligonucleotide
  source 1..20: mol_type = other RNA
tcaaggaagatggcatttct

SEQ ID NO: 1088 - RNA, 20 nt, synthetic construct
  misc_feature 1..20: note = Description of Artificial Sequence: Synthetic oligonucleotide
  source 1..20: mol_type = other RNA
tcaaggaagatggcatttct

SEQ ID NO: 1089 - RNA, 20 nt, synthetic construct
  misc_feature 1..20: note = Description of Artificial Sequence: Synthetic oligonucleotide
  source 1..20: mol_type = other RNA
tcaaggaagatggcatttct

SEQ ID NO: 1090 - RNA, 20 nt, synthetic construct
  misc_feature 1..20: note = Description of Artificial Sequence: Synthetic oligonucleotide
  source 1..20: mol_type = other RNA
tcaaggaagatggcatttct

SEQ ID NO: 1091 - RNA, 20 nt, synthetic construct
  misc_feature 1..20: note = Description of Artificial Sequence: Synthetic oligonucleotide
  source 1..20: mol_type = other RNA
tcaaggaagatggcatttct

SEQ ID NO: 1092 - RNA, 20 nt, synthetic construct
  misc_feature 1..20: note = Description of Artificial Sequence: Synthetic oligonucleotide
  source 1..20: mol_type = other RNA
tcaaggaagatggcatttct

SEQ ID NO: 1093 - RNA, 20 nt, synthetic construct
  misc_feature 1..20: note = Description of Artificial Sequence: Synthetic oligonucleotide
  source 1..20: mol_type = other RNA
tcaaggaagatggcatttct

SEQ ID NO: 1094 - RNA, 20 nt, synthetic construct
  misc_feature 1..20: note = Description of Artificial Sequence: Synthetic oligonucleotide
  source 1..20: mol_type = other RNA
tcaaggaagatggcatttct

SEQ ID NO: 1095 - RNA, 20 nt, synthetic construct
  misc_feature 1..20: note = Description of Artificial Sequence: Synthetic oligonucleotide
  source 1..20: mol_type = other RNA
tcaaggaagatggcatttct

SEQ ID NO: 1096 - RNA, 20 nt, synthetic construct
  misc_feature 1..20: note = Description of Artificial Sequence: Synthetic oligonucleotide
  source 1..20: mol_type = other RNA
tcaaggaagatggcatttct

SEQ ID NO: 1097 - RNA, 20 nt, synthetic construct
  misc_feature 1..20: note = Description of Artificial Sequence: Synthetic oligonucleotide
  source 1..20: mol_type = other RNA
tcaaggaagatggcatttct

SEQ ID NO: 1098 - RNA, 20 nt, synthetic construct
  misc_feature 1..20: note = Description of Artificial Sequence: Synthetic oligonucleotide
  source 1..20: mol_type = other RNA
tcaaggaagatggcatttct

SEQ ID NO: 1099 - RNA, 20 nt, synthetic construct
  misc_feature 1..20: note = Description of Artificial Sequence: Synthetic oligonucleotide
  source 1..20: mol_type = other RNA
tcaaggaagatggcatttct

SEQ ID NO: 1100 - RNA, 20 nt, synthetic construct
  misc_feature 1..20: note = Description of Artificial Sequence: Synthetic oligonucleotide
  source 1..20: mol_type = other RNA
tcaaggaagatggcatttct

SEQ ID NO: 1101 - RNA, 20 nt, synthetic construct
  misc_feature 1..20: note = Description of Artificial Sequence: Synthetic oligonucleotide
  source 1..20: mol_type = other RNA
tcaaggaagatggcatttct

SEQ ID NO: 1102 - RNA, 20 nt, synthetic construct
  misc_feature 1..20: note = Description of Artificial Sequence: Synthetic oligonucleotide
  source 1..20: mol_type = other RNA
tcaaggaagatggcatttct

SEQ ID NO: 1103 - RNA, 20 nt, synthetic construct
  misc_feature 1..20: note = Description of Artificial Sequence: Synthetic oligonucleotide
  source 1..20: mol_type = other RNA
tcaaggaagatggcatttct

SEQ ID NO: 1104 - RNA, 20 nt, synthetic construct
  misc_feature 1..20: note = Description of Artificial Sequence: Synthetic oligonucleotide
  source 1..20: mol_type = other RNA
tcaaggaagatggcatttct

SEQ ID NO: 1105 - RNA, 20 nt, synthetic construct
  misc_feature 1..20: note = Description of Artificial Sequence: Synthetic oligonucleotide
  source 1..20: mol_type = other RNA
tcaaggaagatggcatttct

SEQ ID NO: 1106 - RNA, 20 nt, synthetic construct
  misc_feature 1..20: note = Description of Artificial Sequence: Synthetic oligonucleotide
  source 1..20: mol_type = other RNA
tcaaggaagatggcatttct

SEQ ID NO: 1107 - RNA, 20 nt, synthetic construct
  misc_feature 1..20: note = Description of Artificial Sequence: Synthetic oligonucleotide
  source 1..20: mol_type = other RNA
tcaaggaagatggcatttct

SEQ ID NO: 1108 - RNA, 20 nt, synthetic construct
  misc_feature 1..20: note = Description of Artificial Sequence: Synthetic oligonucleotide
  source 1..20: mol_type = other RNA
tcaaggaagatggcatttct

SEQ ID NO: 1109 - RNA, 20 nt, synthetic construct
  misc_feature 1..20: note = Description of Artificial Sequence: Synthetic oligonucleotide
  source 1..20: mol_type = other RNA
tcaaggaagatggcatttct

SEQ ID NO: 1110 - RNA, 20 nt, synthetic construct
  misc_feature 1..20: note = Description of Artificial Sequence: Synthetic oligonucleotide
  source 1..20: mol_type = other RNA
tcaaggaagatggcatttct

SEQ ID NO: 1111 - RNA, 20 nt, synthetic construct
  misc_feature 1..20: note = Description of Artificial Sequence: Synthetic oligonucleotide
  source 1..20: mol_type = other RNA
tcaaggaagatggcatttct

SEQ ID NO: 1112 - RNA, 20 nt, synthetic construct
  misc_feature 1..20: note = Description of Artificial Sequence: Synthetic oligonucleotide
  source 1..20: mol_type = other RNA
tcaaggaagatggcatttct

SEQ ID NO: 1113 - RNA, 20 nt, synthetic construct
  misc_feature 1..20: note = Description of Artificial Sequence: Synthetic oligonucleotide
  source 1..20: mol_type = other RNA
tcaaggaagatggcatttct

SEQ ID NO: 1114 - RNA, 20 nt, synthetic construct
  misc_feature 1..20: note = Description of Artificial Sequence: Synthetic oligonucleotide
  source 1..20: mol_type = other RNA
tcaaggaagatggcatttct

SEQ ID NO: 1115 - RNA, 20 nt, synthetic construct
  misc_feature 1..20: note = Description of Artificial Sequence: Synthetic oligonucleotide
  source 1..20: mol_type = other RNA
tcaaggaagatggcatttct

SEQ ID NO: 1116 - RNA, 20 nt, synthetic construct
  misc_feature 1..20: note = Description of Artificial Sequence: Synthetic oligonucleotide
  source 1..20: mol_type = other RNA
tcaaggaagatggcatttct

SEQ ID NO: 1117 - RNA, 20 nt, synthetic construct
  misc_feature 1..20: note = Description of Artificial Sequence: Synthetic oligonucleotide
  source 1..20: mol_type = other RNA
tcaaggaagatggcatttct

SEQ ID NO: 1118 - RNA, 20 nt, synthetic construct
  misc_feature 1..20: note = Description of Artificial Sequence: Synthetic oligonucleotide
  source 1..20: mol_type = other RNA
tcaaggaagatggcatttct

SEQ ID NO: 1119 - RNA, 20 nt, synthetic construct
  misc_feature 1..20: note = Description of Artificial Sequence: Synthetic oligonucleotide
  source 1..20: mol_type = other RNA
tcaaggaagatggcatttct

SEQ ID NO: 1120 - RNA, 20 nt, synthetic construct
  misc_feature 1..20: note = Description of Artificial Sequence: Synthetic oligonucleotide
  source 1..20: mol_type = other RNA
tcaaggaagatggcatttct

SEQ ID NO: 1121 - RNA, 20 nt, synthetic construct
  misc_feature 1..20: note = Description of Artificial Sequence: Synthetic oligonucleotide
  source 1..20: mol_type = other RNA
tcaaggaagatggcatttct

SEQ ID NO: 1122 - RNA, 20 nt, synthetic construct
  misc_feature 1..20: note = Description of Artificial Sequence: Synthetic oligonucleotide
  source 1..20: mol_type = other RNA
tcaaggaagatggcatttct

SEQ ID NO: 1123 - RNA, 20 nt, synthetic construct
  misc_feature 1..20: note = Description of Artificial Sequence: Synthetic oligonucleotide
  source 1..20: mol_type = other RNA
tcaaggaagatggcatttct

SEQ ID NO: 1124 - RNA, 20 nt, synthetic construct
  misc_feature 1..20: note = Description of Artificial Sequence: Synthetic oligonucleotide
  source 1..20: mol_type = other RNA
tcaaggaagatggcatttct

SEQ ID NO: 1125 - RNA, 20 nt, synthetic construct
  misc_feature 1..20: note = Description of Artificial Sequence: Synthetic oligonucleotide
  source 1..20: mol_type = other RNA
tcaaggaagatggcatttct

SEQ ID NO: 1126 - RNA, 20 nt, synthetic construct
  misc_feature 1..20: note = Description of Artificial Sequence: Synthetic oligonucleotide
  source 1..20: mol_type = other RNA
tcaaggaagatggcatttct

SEQ ID NO: 1127 - RNA, 20 nt, synthetic construct
  misc_feature 1..20: note = Description of Artificial Sequence: Synthetic oligonucleotide
  source 1..20: mol_type = other RNA
tcaaggaagatggcatttct

SEQ ID NO: 1128 - RNA, 20 nt, synthetic construct
  misc_feature 1..20: note = Description of Artificial Sequence: Synthetic oligonucleotide
  source 1..20: mol_type = other RNA
tcaaggaagatggcatttct

SEQ ID NO: 1129 - RNA, 20 nt, synthetic construct
  misc_feature 1..20: note = Description of Artificial Sequence: Synthetic oligonucleotide
  source 1..20: mol_type = other RNA
tcaaggaagatggcatttct

SEQ ID NO: 1130 - RNA, 20 nt, synthetic construct
  misc_feature 1..20: note = Description of Artificial Sequence: Synthetic oligonucleotide
  source 1..20: mol_type = other RNA
tcaaggaagatggcatttct

SEQ ID NO: 1131 - RNA, 20 nt, synthetic construct
  misc_feature 1..20: note = Description of Artificial Sequence: Synthetic oligonucleotide
  source 1..20: mol_type = other RNA
tcaaggaagatggcatttct

SEQ ID NO: 1132 - RNA, 20 nt, synthetic construct
  misc_feature 1..20: note = Description of Artificial Sequence: Synthetic oligonucleotide
  source 1..20: mol_type = other RNA
tcaaggaagatggcatttct

SEQ ID NO: 1133 - RNA, 20 nt, synthetic construct
  misc_feature 1..20: note = Description of Artificial Sequence: Synthetic oligonucleotide
  source 1..20: mol_type = other RNA
tcaaggaagatggcatttct

SEQ ID NO: 1134 - RNA, 20 nt, synthetic construct
  misc_feature 1..20: note = Description of Artificial Sequence: Synthetic oligonucleotide
  source 1..20: mol_type = other RNA
tcaaggaagatggcatttct

SEQ ID NO: 1135 - RNA, 20 nt, synthetic construct
  misc_feature 1..20: note = Description of Artificial Sequence: Synthetic oligonucleotide
  source 1..20: mol_type = other RNA
tcaaggaagatggcatttct

SEQ ID NO: 1136 - RNA, 20 nt, synthetic construct
  misc_feature 1..20: note = Description of Artificial Sequence: Synthetic oligonucleotide
  source 1..20: mol_type = other RNA
tcaaggaagatggcatttct

SEQ ID NO: 1137 - RNA, 20 nt, synthetic construct
  misc_feature 1..20: note = Description of Artificial Sequence: Synthetic oligonucleotide
  source 1..20: mol_type = other RNA
tcaaggaagatggcatttct

SEQ ID NO: 1138 - RNA, 20 nt, synthetic construct
  misc_feature 1..20: note = Description of Artificial Sequence: Synthetic oligonucleotide
  source 1..20: mol_type = other RNA
tcaaggaagatggcatttct

SEQ ID NO: 1139 - RNA, 20 nt, synthetic construct
  misc_feature 1..20: note = Description of Artificial Sequence: Synthetic oligonucleotide
  source 1..20: mol_type = other RNA
tcaaggaagatggcatttct

SEQ ID NO: 1140 - RNA, 20 nt, synthetic construct
  misc_feature 1..20: note = Description of Artificial Sequence: Synthetic oligonucleotide
  source 1..20: mol_type = other RNA
tcaaggaagatggcatttct

SEQ ID NO: 1141 - RNA, 20 nt, synthetic construct
  misc_feature 1..20: note = Description of Artificial Sequence: Synthetic oligonucleotide
  source 1..20: mol_type = other RNA
tcaaggaagatggcatttct

SEQ ID NO: 1142 - RNA, 20 nt, synthetic construct
  misc_feature 1..20: note = Description of Artificial Sequence: Synthetic oligonucleotide
  source 1..20: mol_type = other RNA
tcaaggaagatggcatttct

SEQ ID NO: 1143 - RNA, 20 nt, synthetic construct
  misc_feature 1..20: note = Description of Artificial Sequence: Synthetic oligonucleotide
  source 1..20: mol_type = other RNA
tcaaggaagatggcatttct

SEQ ID NO: 1144 - RNA, 20 nt, synthetic construct
  misc_feature 1..20: note = Description of Artificial Sequence: Synthetic oligonucleotide
  source 1..20: mol_type = other RNA
tcaaggaagatggcatttct

SEQ ID NO: 1145 - RNA, 20 nt, synthetic construct
  misc_feature 1..20: note = Description of Artificial Sequence: Synthetic oligonucleotide
  source 1..20: mol_type = other RNA
tcaaggaagatggcatttct

SEQ ID NO: 1146 - RNA, 20 nt, synthetic construct
  misc_feature 1..20: note = Description of Artificial Sequence: Synthetic oligonucleotide
  source 1..20: mol_type = other RNA
tcaaggaagatggcatttct

SEQ ID NO: 1147 - RNA, 20 nt, synthetic construct
  misc_feature 1..20: note = Description of Artificial Sequence: Synthetic oligonucleotide
  source 1..20: mol_type = other RNA
tcaaggaagatggcatttct

SEQ ID NO: 1148 - RNA, 20 nt, synthetic construct
  misc_feature 1..20: note = Description of Artificial Sequence: Synthetic oligonucleotide
  source 1..20: mol_type = other RNA
tcaaggaagatggcatttct

SEQ ID NO: 1149 - RNA, 20 nt, synthetic construct
  misc_feature 1..20: note = Description of Artificial Sequence: Synthetic oligonucleotide
  source 1..20: mol_type = other RNA
tcaaggaagatggcatttct

SEQ ID NO: 1150 - RNA, 20 nt, synthetic construct
  misc_feature 1..20: note = Description of Artificial Sequence: Synthetic oligonucleotide
  source 1..20: mol_type = other RNA
tcaaggaagatggcatttct

SEQ ID NO: 1151 - RNA, 20 nt, synthetic construct
  misc_feature 1..20: note = Description of Artificial Sequence: Synthetic oligonucleotide
  source 1..20: mol_type = other RNA
tcaaggaagatggcatttct

SEQ ID NO: 1152 - RNA, 20 nt, synthetic construct
  misc_feature 1..20: note = Description of Artificial Sequence: Synthetic oligonucleotide
  source 1..20: mol_type = other RNA
tcaaggaagatggcatttct

SEQ ID NO: 1153 - RNA, 20 nt, synthetic construct
  misc_feature 1..20: note = Description of Artificial Sequence: Synthetic oligonucleotide
  source 1..20: mol_type = other RNA
tcaaggaagatggcatttct

SEQ ID NO: 1154 - RNA, 20 nt, synthetic construct
  misc_feature 1..20: note = Description of Artificial Sequence: Synthetic oligonucleotide
  source 1..20: mol_type = other RNA
tcaaggaagatggcatttct

SEQ ID NO: 1155 - RNA, 20 nt, synthetic construct
  misc_feature 1..20: note = Description of Artificial Sequence: Synthetic oligonucleotide
  source 1..20: mol_type = other RNA
tcaaggaagatggcatttct

SEQ ID NO: 1156 - RNA, 20 nt, synthetic construct
  misc_feature 1..20: note = Description of Artificial Sequence: Synthetic oligonucleotide
  source 1..20: mol_type = other RNA
tcaaggaagatggcatttct

SEQ ID NO: 1157 - RNA, 20 nt, synthetic construct
  misc_feature 1..20: note = Description of Artificial Sequence: Synthetic oligonucleotide
  source 1..20: mol_type = other RNA
tcaaggaagatggcatttct

SEQ ID NO: 1158 - RNA, 20 nt, synthetic construct
  misc_feature 1..20: note = Description of Artificial Sequence: Synthetic oligonucleotide
  source 1..20: mol_type = other RNA
tcaaggaagatggcatttct

SEQ ID NO: 1159 - RNA, 20 nt, synthetic construct
  misc_feature 1..20: note = Description of Artificial Sequence: Synthetic oligonucleotide
  source 1..20: mol_type = other RNA
tcaaggaagatggcatttct

SEQ ID NO: 1160 - RNA, 20 nt, synthetic construct
  misc_feature 1..20: note = Description of Artificial Sequence: Synthetic oligonucleotide
  source 1..20: mol_type = other RNA
tcaaggaagatggcatttct

SEQ ID NO: 1161 - RNA, 20 nt, synthetic construct
  misc_feature 1..20: note = Description of Artificial Sequence: Synthetic oligonucleotide
  source 1..20: mol_type = other RNA
tcaaggaagatggcatttct

SEQ ID NO: 1162 - RNA, 20 nt, synthetic construct
  misc_feature 1..20: note = Description of Artificial Sequence: Synthetic oligonucleotide
  source 1..20: mol_type = other RNA
tcaaggaagatggcatttct

SEQ ID NO: 1163 - RNA, 20 nt, synthetic construct
  misc_feature 1..20: note = Description of Artificial Sequence: Synthetic oligonucleotide
  source 1..20: mol_type = other RNA
tcaaggaagatggcatttct

SEQ ID NO: 1164 - RNA, 20 nt, synthetic construct
  misc_feature 1..20: note = Description of Artificial Sequence: Synthetic oligonucleotide
  source 1..20: mol_type = other RNA
tcaaggaagatggcatttct

SEQ ID NO: 1165 - RNA, 20 nt, synthetic construct
  misc_feature 1..20: note = Description of Artificial Sequence: Synthetic oligonucleotide
  source 1..20: mol_type = other RNA
tcaaggaagatggcatttct

SEQ ID NO: 1166 - RNA, 20 nt, synthetic construct
  misc_feature 1..20: note = Description of Artificial Sequence: Synthetic oligonucleotide
  source 1..20: mol_type = other RNA
tcaaggaagatggcatttct

SEQ ID NO: 1167 - RNA, 20 nt, synthetic construct
  misc_feature 1..20: note = Description of Artificial Sequence: Synthetic oligonucleotide
  source 1..20: mol_type = other RNA
tcaaggaagatggcatttct

SEQ ID NO: 1168 - RNA, 20 nt, synthetic construct
  misc_feature 1..20: note = Description of Artificial Sequence: Synthetic oligonucleotide
  source 1..20: mol_type = other RNA
tcaaggaagatggcatttct

SEQ ID NO: 1169 - RNA, 20 nt, synthetic construct
  misc_feature 1..20: note = Description of Artificial Sequence: Synthetic oligonucleotide
  source 1..20: mol_type = other RNA
tcaaggaagatggcatttct

SEQ ID NO: 1170 - RNA, 20 nt, synthetic construct
  misc_feature 1..20: note = Description of Artificial Sequence: Synthetic oligonucleotide
  source 1..20: mol_type = other RNA
tcaaggaagatggcatttct

SEQ ID NO: 1171 - RNA, 20 nt, synthetic construct
  misc_feature 1..20: note = Description of Artificial Sequence: Synthetic oligonucleotide
  source 1..20: mol_type = other RNA
tcaaggaagatggcatttct

SEQ ID NO: 1172 - RNA, 20 nt, synthetic construct
  misc_feature 1..20: note = Description of Artificial Sequence: Synthetic oligonucleotide
  source 1..20: mol_type = other RNA
tcaaggaagatggcatttct

SEQ ID NO: 1173 - RNA, 20 nt, synthetic construct
  misc_feature 1..20: note = Description of Artificial Sequence: Synthetic oligonucleotide
  source 1..20: mol_type = other RNA
tcaaggaagatggcatttct

SEQ ID NO: 1174 - RNA, 20 nt, synthetic construct
  misc_feature 1..20: note = Description of Artificial Sequence: Synthetic oligonucleotide
  source 1..20: mol_type = other RNA
tcaaggaagatggcatttct

SEQ ID NO: 1175 - RNA, 20 nt, synthetic construct
  misc_feature 1..20: note = Description of Artificial Sequence: Synthetic oligonucleotide
  source 1..20: mol_type = other RNA
tcaaggaagatggcatttct

SEQ ID NO: 1176 - RNA, 20 nt, synthetic construct
  misc_feature 1..20: note = Description of Artificial Sequence: Synthetic oligonucleotide
  source 1..20: mol_type = other RNA
tcaaggaagatggcatttct

SEQ ID NO: 1177 - RNA, 20 nt, synthetic construct
  misc_feature 1..20: note = Description of Artificial Sequence: Synthetic oligonucleotide
  source 1..20: mol_type = other RNA
tcaaggaagatggcatttct

SEQ ID NO: 1178 - RNA, 20 nt, synthetic construct
  misc_feature 1..20: note = Description of Artificial Sequence: Synthetic oligonucleotide
  source 1..20: mol_type = other RNA
tcaaggaagatggcatttct

SEQ ID NO: 1179 - RNA, 20 nt, synthetic construct
  misc_feature 1..20: note = Description of Artificial Sequence: Synthetic oligonucleotide
  source 1..20: mol_type = other RNA
tcaaggaagatggcatttct

SEQ ID NO: 1180 - RNA, 20 nt, synthetic construct
  misc_feature 1..20: note = Description of Artificial Sequence: Synthetic oligonucleotide
  source 1..20: mol_type = other RNA
tcaaggaagatggcatttct

SEQ ID NO: 1181 - RNA, 20 nt, synthetic construct
  misc_feature 1..20: note = Description of Artificial Sequence: Synthetic oligonucleotide
  source 1..20: mol_type = other RNA
tcaaggaagatggcatttct

SEQ ID NO: 1182 - RNA, 20 nt, synthetic construct
  misc_feature 1..20: note = Description of Artificial Sequence: Synthetic oligonucleotide
  source 1..20: mol_type = other RNA
tcaaggaagatggcatttct

SEQ ID NO: 1183 - RNA, 20 nt, synthetic construct
  misc_feature 1..20: note = Description of Artificial Sequence: Synthetic oligonucleotide
  source 1..20: mol_type = other RNA
tcaaggaagatggcatttct

SEQ ID NO: 1184 - RNA, 20 nt, synthetic construct
  misc_feature 1..20: note = Description of Artificial Sequence: Synthetic oligonucleotide
  source 1..20: mol_type = other RNA
tcaaggaagatggcatttct

SEQ ID NO: 1185 - RNA, 20 nt, synthetic construct
  misc_feature 1..20: note = Description of Artificial Sequence: Synthetic oligonucleotide
  source 1..20: mol_type = other RNA
tcaaggaagatggcatttct

SEQ ID NO: 1186 - RNA, 20 nt, synthetic construct
  misc_feature 1..20: note = Description of Artificial Sequence: Synthetic oligonucleotide
  source 1..20: mol_type = other RNA
tcaaggaagatggcatttct

SEQ ID NO: 1187 - RNA, 20 nt, synthetic construct
  misc_feature 1..20: note = Description of Artificial Sequence: Synthetic oligonucleotide
  source 1..20: mol_type = other RNA
tcaaggaagatggcatttct

SEQ ID NO: 1188 - RNA, 20 nt, synthetic construct
  misc_feature 1..20: note = Description of Artificial Sequence: Synthetic oligonucleotide
  source 1..20: mol_type = other RNA
tcaaggaagatggcatttct

SEQ ID NO: 1189 - RNA, 20 nt, synthetic construct
  misc_feature 1..20: note = Description of Artificial Sequence: Synthetic oligonucleotide
  source 1..20: mol_type = other RNA
tcaaggaagatggcatttct

SEQ ID NO: 1190 - RNA, 20 nt, synthetic construct
  misc_feature 1..20: note = Description of Artificial Sequence: Synthetic oligonucleotide
  source 1..20: mol_type = other RNA
tcaaggaagatggcatttct

SEQ ID NO: 1191 - RNA, 20 nt, synthetic construct
  misc_feature 1..20: note = Description of Artificial Sequence: Synthetic oligonucleotide
  source 1..20: mol_type = other RNA
tcaaggaagatggcatttct

SEQ ID NO: 1192 - RNA, 20 nt, synthetic construct
  misc_feature 1..20: note = Description of Artificial Sequence: Synthetic oligonucleotide
  source 1..20: mol_type = other RNA
tcaaggaagatggcatttct

SEQ ID NO: 1193 - RNA, 20 nt, synthetic construct
  misc_feature 1..20: note = Description of Artificial Sequence: Synthetic oligonucleotide
  source 1..20: mol_type = other RNA
tcaaggaagatggcatttct

SEQ ID NO: 1194 - RNA, 20 nt, synthetic construct
  misc_feature 1..20: note = Description of Artificial Sequence: Synthetic oligonucleotide
  source 1..20: mol_type = other RNA
tcaaggaagatggcatttct

SEQ ID NO: 1195 - RNA, 20 nt, synthetic construct
  misc_feature 1..20: note = Description of Artificial Sequence: Synthetic oligonucleotide
  source 1..20: mol_type = other RNA
tcaaggaagatggcatttct

SEQ ID NO: 1196 - RNA, 20 nt, synthetic construct
  misc_feature 1..20: note = Description of Artificial Sequence: Synthetic oligonucleotide
  source 1..20: mol_type = other RNA
tcaaggaagatggcatttct

SEQ ID NO: 1197 - RNA, 20 nt, synthetic construct
  misc_feature 1..20: note = Description of Artificial Sequence: Synthetic oligonucleotide
  source 1..20: mol_type = other RNA
tcaaggaagatggcatttct

SEQ ID NO: 1198 - RNA, 20 nt, synthetic construct
  misc_feature 1..20: note = Description of Artificial Sequence: Synthetic oligonucleotide
  source 1..20: mol_type = other RNA
tcaaggaagatggcatttct

SEQ ID NO: 1199 - RNA, 20 nt, synthetic construct
  misc_feature 1..20: note = Description of Artificial Sequence: Synthetic oligonucleotide
  source 1..20: mol_type = other RNA
tcaaggaagatggcatttct

SEQ ID NO: 1200 - RNA, 20 nt, synthetic construct
  misc_feature 1..20: note = Description of Artificial Sequence: Synthetic oligonucleotide
  source 1..20: mol_type = other RNA
tcaaggaagatggcatttct

SEQ ID NO: 1201 - RNA, 20 nt, synthetic construct
  misc_feature 1..20: note = Description of Artificial Sequence: Synthetic oligonucleotide
  source 1..20: mol_type = other RNA
tcaaggaagatggcatttct

SEQ ID NO: 1202 - RNA, 20 nt, synthetic construct
  misc_feature 1..20: note = Description of Artificial Sequence: Synthetic oligonucleotide
  source 1..20: mol_type = other RNA
tcaaggaagatggcatttct

SEQ ID NO: 1203 - RNA, 20 nt, synthetic construct
  misc_feature 1..20: note = Description of Artificial Sequence: Synthetic oligonucleotide
  source 1..20: mol_type = other RNA
tcaaggaagatggcatttct

SEQ ID NO: 1204 - RNA, 20 nt, synthetic construct
  misc_feature 1..20: note = Description of Artificial Sequence: Synthetic oligonucleotide
  source 1..20: mol_type = other RNA
tcaaggaagatggcatttct

SEQ ID NO: 1205 - RNA, 20 nt, synthetic construct
  misc_feature 1..20: note = Description of Artificial Sequence: Synthetic oligonucleotide
  source 1..20: mol_type = other RNA
tcaaggaagatggcatttct

SEQ ID NO: 1206 - RNA, 20 nt, synthetic construct
  misc_feature 1..20: note = Description of Artificial Sequence: Synthetic oligonucleotide
  source 1..20: mol_type = other RNA
tcaaggaagatggcatttct

SEQ ID NO: 1207 - RNA, 20 nt, synthetic construct
  misc_feature 1..20: note = Description of Artificial Sequence: Synthetic oligonucleotide
  source 1..20: mol_type = other RNA
tcaaggaagatggcatttct

SEQ ID NO: 1208 - RNA, 20 nt, synthetic construct
  misc_feature 1..20: note = Description of Artificial Sequence: Synthetic oligonucleotide
  source 1..20: mol_type = other RNA
tcaaggaagatggcatttct

SEQ ID NO: 1209 - RNA, 20 nt, synthetic construct
  misc_feature 1..20: note = Description of Artificial Sequence: Synthetic oligonucleotide
  source 1..20: mol_type = other RNA
tcaaggaagatggcatttct

SEQ ID NO: 1210 - RNA, 20 nt, synthetic construct
  misc_feature 1..20: note = Description of Artificial Sequence: Synthetic oligonucleotide
  source 1..20: mol_type = other RNA
tcaaggaagatggcatttct

SEQ ID NO: 1211 - RNA, 20 nt, synthetic construct
  misc_feature 1..20: note = Description of Artificial Sequence: Synthetic oligonucleotide
  source 1..20: mol_type = other RNA
tcaaggaagatggcatttct

SEQ ID NO: 1212 - RNA, 20 nt, synthetic construct
  misc_feature 1..20: note = Description of Artificial Sequence: Synthetic oligonucleotide
  source 1..20: mol_type = other RNA
tcaaggaagatggcatttct

SEQ ID NO: 1213 - RNA, 20 nt, synthetic construct
  misc_feature 1..20: note = Description of Artificial Sequence: Synthetic oligonucleotide
  source 1..20: mol_type = other RNA
tcaaggaagatggcatttct

SEQ ID NO: 1214 - RNA, 20 nt, synthetic construct
  misc_feature 1..20: note = Description of Artificial Sequence: Synthetic oligonucleotide
  source 1..20: mol_type = other RNA
tcaaggaagatggcatttct

SEQ ID NO: 1215 - RNA, 20 nt, synthetic construct
  misc_feature 1..20: note = Description of Artificial Sequence: Synthetic oligonucleotide
  source 1..20: mol_type = other RNA
tcaaggaagatggcatttct

SEQ ID NO: 1216 - RNA, 20 nt, synthetic construct
  misc_feature 1..20: note = Description of Artificial Sequence: Synthetic oligonucleotide
  source 1..20: mol_type = other RNA
tcaaggaagatggcatttct

SEQ ID NO: 1217 - RNA, 20 nt, synthetic construct
  misc_feature 1..20: note = Description of Artificial Sequence: Synthetic oligonucleotide
  source 1..20: mol_type = other RNA
tcaaggaagatggcatttct

SEQ ID NO: 1218 - RNA, 20 nt, synthetic construct
  misc_feature 1..20: note = Description of Artificial Sequence: Synthetic oligonucleotide
  source 1..20: mol_type = other RNA
tcaaggaagatggcatttct

SEQ ID NO: 1219 - RNA, 20 nt, synthetic construct
  misc_feature 1..20: note = Description of Artificial Sequence: Synthetic oligonucleotide
  source 1..20: mol_type = other RNA
tcaaggaagatggcatttct

SEQ ID NO: 1220 - RNA, 20 nt, synthetic construct
  misc_feature 1..20: note = Description of Artificial Sequence: Synthetic oligonucleotide
  source 1..20: mol_type = other RNA
tcaaggaagatggcatttct

SEQ ID NO: 1221 - RNA, 20 nt, synthetic construct
  misc_feature 1..20: note = Description of Artificial Sequence: Synthetic oligonucleotide
  source 1..20: mol_type = other RNA
tcaaggaagatggcatttct

SEQ ID NO: 1222 - RNA, 20 nt, synthetic construct
  misc_feature 1..20: note = Description of Artificial Sequence: Synthetic oligonucleotide
  source 1..20: mol_type = other RNA
tcaaggaagatggcatttct

SEQ ID NO: 1223 - RNA, 20 nt, synthetic construct
  misc_feature 1..20: note = Description of Artificial Sequence: Synthetic oligonucleotide
  source 1..20: mol_type = other RNA
tcaaggaagatggcatttct

SEQ ID NO: 1224 - RNA, 20 nt, synthetic construct
  misc_feature 1..20: note = Description of Artificial Sequence: Synthetic oligonucleotide
  source 1..20: mol_type = other RNA
tcaaggaagatggcatttct

SEQ ID NO: 1225 - RNA, 20 nt, synthetic construct
  misc_feature 1..20: note = Description of Artificial Sequence: Synthetic oligonucleotide
  source 1..20: mol_type = other RNA
tcaaggaagatggcatttct

SEQ ID NO: 1226 - RNA, 20 nt, synthetic construct
  misc_feature 1..20: note = Description of Artificial Sequence: Synthetic oligonucleotide
  source 1..20: mol_type = other RNA
tcaaggaagatggcatttct

SEQ ID NO: 1227 - RNA, 20 nt, synthetic construct
  misc_feature 1..20: note = Description of Artificial Sequence: Synthetic oligonucleotide
  source 1..20: mol_type = other RNA
tcaaggaagatggcatttct

SEQ ID NO: 1228 - RNA, 20 nt, synthetic construct
  misc_feature 1..20: note = Description of Artificial Sequence: Synthetic oligonucleotide
  source 1..20: mol_type = other RNA
tcaaggaagatggcatttct

SEQ ID NO: 1229 - RNA, 20 nt, synthetic construct
  misc_feature 1..20: note = Description of Artificial Sequence: Synthetic oligonucleotide
  source 1..20: mol_type = other RNA
tcaaggaagatggcatttct

SEQ ID NO: 1230 - RNA, 20 nt, synthetic construct
  misc_feature 1..20: note = Description of Artificial Sequence: Synthetic oligonucleotide
  source 1..20: mol_type = other RNA
tcaaggaagatggcatttct

SEQ ID NO: 1231 - RNA, 20 nt, synthetic construct
  misc_feature 1..20: note = Description of Artificial Sequence: Synthetic oligonucleotide
  source 1..20: mol_type = other RNA
tcaaggaagatggcatttct

SEQ ID NO: 1232 - RNA, 20 nt, synthetic construct
  misc_feature 1..20: note = Description of Artificial Sequence: Synthetic oligonucleotide
  source 1..20: mol_type = other RNA
tcaaggaagatggcatttct

SEQ ID NO: 1233 - RNA, 20 nt, synthetic construct
  misc_feature 1..20: note = Description of Artificial Sequence: Synthetic oligonucleotide
  source 1..20: mol_type = other RNA
tcaaggaagatggcatttct

SEQ ID NO: 1234 - RNA, 20 nt, synthetic construct
  misc_feature 1..20: note = Description of Artificial Sequence: Synthetic oligonucleotide
  source 1..20: mol_type = other RNA
tcaaggaagatggcatttct

SEQ ID NO: 1235 - RNA, 20 nt, synthetic construct
  misc_feature 1..20: note = Description of Artificial Sequence: Synthetic oligonucleotide
  source 1..20: mol_type = other RNA
tcaaggaagatggcatttct

SEQ ID NO: 1236 - RNA, 20 nt, synthetic construct
  misc_feature 1..20: note = Description of Artificial Sequence: Synthetic oligonucleotide
  source 1..20: mol_type = other RNA
tcaaggaagatggcatttct

SEQ ID NO: 1237 - RNA, 20 nt, synthetic construct
  misc_feature 1..20: note = Description of Artificial Sequence: Synthetic oligonucleotide
  source 1..20: mol_type = other RNA
tcaaggaagatggcatttct

SEQ ID NO: 1238 - RNA, 20 nt, synthetic construct
  misc_feature 1..20: note = Description of Artificial Sequence: Synthetic oligonucleotide
  source 1..20: mol_type = other RNA
tcaaggaagatggcatttct

SEQ ID NO: 1239 - RNA, 20 nt, synthetic construct
  misc_feature 1..20: note = Description of Artificial Sequence: Synthetic oligonucleotide
  source 1..20: mol_type = other RNA
tcaaggaagatggcatttct

SEQ ID NO: 1240 - RNA, 20 nt, synthetic construct
  misc_feature 1..20: note = Description of Artificial Sequence: Synthetic oligonucleotide
  source 1..20: mol_type = other RNA
tcaaggaagatggcatttct

SEQ ID NO: 1241 - RNA, 20 nt, synthetic construct
  misc_feature 1..20: note = Description of Artificial Sequence: Synthetic oligonucleotide
  source 1..20: mol_type = other RNA
tcaaggaagatggcatttct

SEQ ID NO: 1242 - RNA, 20 nt, synthetic construct
  misc_feature 1..20: note = Description of Artificial Sequence: Synthetic oligonucleotide
  source 1..20: mol_type = other RNA
tcaaggaagatggcatttct

SEQ ID NO: 1243 - RNA, 20 nt, synthetic construct
  misc_feature 1..20: note = Description of Artificial Sequence: Synthetic oligonucleotide
  source 1..20: mol_type = other RNA
tcaaggaagatggcatttct

SEQ ID NO: 1244 - RNA, 20 nt, synthetic construct
  misc_feature 1..20: note = Description of Artificial Sequence: Synthetic oligonucleotide
  source 1..20: mol_type = other RNA
tcaaggaagatggcatttct

SEQ ID NO: 1245 - RNA, 20 nt, synthetic construct
  misc_feature 1..20: note = Description of Artificial Sequence: Synthetic oligonucleotide
  source 1..20: mol_type = other RNA
tcaaggaagatggcatttct

SEQ ID NO: 1246 - RNA, 20 nt, synthetic construct
  misc_feature 1..20: note = Description of Artificial Sequence: Synthetic oligonucleotide
  source 1..20: mol_type = other RNA
tcaaggaagatggcatttct

SEQ ID NO: 1247 - RNA, 20 nt, synthetic construct
  misc_feature 1..20: note = Description of Artificial Sequence: Synthetic oligonucleotide
  source 1..20: mol_type = other RNA
tcaaggaagatggcatttct

SEQ ID NO: 1248 - RNA, 20 nt, synthetic construct
  misc_feature 1..20: note = Description of Artificial Sequence: Synthetic oligonucleotide
  source 1..20: mol_type = other RNA
tcaaggaagatggcatttct

SEQ ID NO: 1249 - RNA, 20 nt, synthetic construct
  misc_feature 1..20: note = Description of Artificial Sequence: Synthetic oligonucleotide
  source 1..20: mol_type = other RNA
tcaaggaagatggcatttct

SEQ ID NO: 1250 - RNA, 20 nt, synthetic construct
  misc_feature 1..20: note = Description of Artificial Sequence: Synthetic oligonucleotide
  source 1..20: mol_type = other RNA
tcaaggaagatggcatttct

SEQ ID NO: 1251 - RNA, 20 nt, synthetic construct
  misc_feature 1..20: note = Description of Artificial Sequence: Synthetic oligonucleotide
  source 1..20: mol_type = other RNA
tcaaggaagatggcatttct

SEQ ID NO: 1252 - RNA, 20 nt, synthetic construct
  misc_feature 1..20: note = Description of Artificial Sequence: Synthetic oligonucleotide
  source 1..20: mol_type = other RNA
tcaaggaagatggcatttct

SEQ ID NO: 1253 - RNA, 20 nt, synthetic construct
  misc_feature 1..20: note = Description of Artificial Sequence: Synthetic oligonucleotide
  source 1..20: mol_type = other RNA
tcaaggaagatggcatttct

SEQ ID NO: 1254 - RNA, 20 nt, synthetic construct
  misc_feature 1..20: note = Description of Artificial Sequence: Synthetic oligonucleotide
  source 1..20: mol_type = other RNA
tcaaggaagatggcatttct

SEQ ID NO: 1255 - RNA, 20 nt, synthetic construct
  misc_feature 1..20: note = Description of Artificial Sequence: Synthetic oligonucleotide
  source 1..20: mol_type = other RNA
tcaaggaagatggcatttct

SEQ ID NO: 1256 - RNA, 20 nt, synthetic construct
  misc_feature 1..20: note = Description of Artificial Sequence: Synthetic oligonucleotide
  source 1..20: mol_type = other RNA
tcaaggaagatggcatttct

SEQ ID NO: 1257 - RNA, 20 nt, synthetic construct
  misc_feature 1..20: note = Description of Artificial Sequence: Synthetic oligonucleotide
  source 1..20: mol_type = other RNA
tcaaggaagatggcatttct

SEQ ID NO: 1258 - RNA, 20 nt, synthetic construct
  misc_feature 1..20: note = Description of Artificial Sequence: Synthetic oligonucleotide
  source 1..20: mol_type = other RNA
tcaaggaagatggcatttct

SEQ ID NO: 1259 - RNA, 20 nt, synthetic construct
  misc_feature 1..20: note = Description of Artificial Sequence: Synthetic oligonucleotide
  source 1..20: mol_type = other RNA
tcaaggaagatggcatttct

SEQ ID NO: 1260 - RNA, 20 nt, synthetic construct
  misc_feature 1..20: note = Description of Artificial Sequence: Synthetic oligonucleotide
  source 1..20: mol_type = other RNA
tcaaggaagatggcatttct

SEQ ID NO: 1261 - RNA, 20 nt, synthetic construct
  misc_feature 1..20: note = Description of Artificial Sequence: Synthetic oligonucleotide
  source 1..20: mol_type = other RNA
tcaaggaagatggcatttct

SEQ ID NO: 1262 - RNA, 20 nt, synthetic construct
  misc_feature 1..20: note = Description of Artificial Sequence: Synthetic oligonucleotide
  source 1..20: mol_type = other RNA
tcaaggaagatggcatttct

SEQ ID NO: 1263 - RNA, 20 nt, synthetic construct
  misc_feature 1..20: note = Description of Artificial Sequence: Synthetic oligonucleotide
  source 1..20: mol_type = other RNA
tcaaggaagatggcatttct

SEQ ID NO: 1264 - RNA, 20 nt, synthetic construct
  misc_feature 1..20: note = Description of Artificial Sequence: Synthetic oligonucleotide
  source 1..20: mol_type = other RNA
tcaaggaagatggcatttct

SEQ ID NO: 1265 - RNA, 20 nt, synthetic construct
  misc_feature 1..20: note = Description of Artificial Sequence: Synthetic oligonucleotide
  source 1..20: mol_type = other RNA
tcaaggaagatggcatttct

SEQ ID NO: 1266 - RNA, 20 nt, synthetic construct
  misc_feature 1..20: note = Description of Artificial Sequence: Synthetic oligonucleotide
  source 1..20: mol_type = other RNA
tcaaggaagatggcatttct

SEQ ID NO: 1267 - RNA, 20 nt, synthetic construct
  misc_feature 1..20: note = Description of Artificial Sequence: Synthetic oligonucleotide
  source 1..20: mol_type = other RNA
tcaaggaagatggcatttct

SEQ ID NO: 1268 - RNA, 20 nt, synthetic construct
  misc_feature 1..20: note = Description of Artificial Sequence: Synthetic oligonucleotide
  source 1..20: mol_type = other RNA
tcaaggaagatggcatttct

SEQ ID NO: 1269 - RNA, 20 nt, synthetic construct
  misc_feature 1..20: note = Description of Artificial Sequence: Synthetic oligonucleotide
  source 1..20: mol_type = other RNA
tcaaggaagatggcatttct

SEQ ID NO: 1270 - RNA, 20 nt, synthetic construct
  misc_feature 1..20: note = Description of Artificial Sequence: Synthetic oligonucleotide
  source 1..20: mol_type = other RNA
tcaaggaagatggcatttct

SEQ ID NO: 1271 - RNA, 20 nt, synthetic construct
  misc_feature 1..20: note = Description of Artificial Sequence: Synthetic oligonucleotide
  source 1..20: mol_type = other RNA
tcaaggaagatggcatttct

SEQ ID NO: 1272 - RNA, 20 nt, synthetic construct
  misc_feature 1..20: note = Description of Artificial Sequence: Synthetic oligonucleotide
  source 1..20: mol_type = other RNA
tcaaggaagatggcatttct

SEQ ID NO: 1273 - RNA, 20 nt, synthetic construct
  misc_feature 1..20: note = Description of Artificial Sequence: Synthetic oligonucleotide
  source 1..20: mol_type = other RNA
tcaaggaagatggcatttct

SEQ ID NO: 1274 - RNA, 20 nt, synthetic construct
  misc_feature 1..20: note = Description of Artificial Sequence: Synthetic oligonucleotide
  source 1..20: mol_type = other RNA
tcaaggaagatggcatttct

SEQ ID NO: 1275 - RNA, 20 nt, synthetic construct
  misc_feature 1..20: note = Description of Artificial Sequence: Synthetic oligonucleotide
  source 1..20: mol_type = other RNA
tcaaggaagatggcatttct

SEQ ID NO: 1276 - RNA, 20 nt, synthetic construct
  misc_feature 1..20: note = Description of Artificial Sequence: Synthetic oligonucleotide
  source 1..20: mol_type = other RNA
tcaaggaagatggcatttct

SEQ ID NO: 1277 - RNA, 20 nt, synthetic construct
  misc_feature 1..20: note = Description of Artificial Sequence: Synthetic oligonucleotide
  source 1..20: mol_type = other RNA
tcaaggaagatggcatttct

SEQ ID NO: 1278 - RNA, 20 nt, synthetic construct
  misc_feature 1..20: note = Description of Artificial Sequence: Synthetic oligonucleotide
  source 1..20: mol_type = other RNA
tcaaggaagatggcatttct

SEQ ID NO: 1279 - RNA, 20 nt, synthetic construct
  misc_feature 1..20: note = Description of Artificial Sequence: Synthetic oligonucleotide
  source 1..20: mol_type = other RNA
tcaaggaagatggcatttct

SEQ ID NO: 1280 - RNA, 20 nt, synthetic construct
  misc_feature 1..20: note = Description of Artificial Sequence: Synthetic oligonucleotide
  source 1..20: mol_type = other RNA
tcaaggaagatggcatttct

SEQ ID NO: 1281 - RNA, 20 nt, synthetic construct
  misc_feature 1..20: note = Description of Artificial Sequence: Synthetic oligonucleotide
  source 1..20: mol_type = other RNA
tcaaggaagatggcatttct

SEQ ID NO: 1282 - RNA, 20 nt, synthetic construct
  misc_feature 1..20: note = Description of Artificial Sequence: Synthetic oligonucleotide
  source 1..20: mol_type = other RNA
tcaaggaagatggcatttct

SEQ ID NO: 1283 - RNA, 20 nt, synthetic construct
  misc_feature 1..20: note = Description of Artificial Sequence: Synthetic oligonucleotide
  source 1..20: mol_type = other RNA
tcaaggaagatggcatttct

SEQ ID NO: 1284 - RNA, 20 nt, synthetic construct
  misc_feature 1..20: note = Description of Artificial Sequence: Synthetic oligonucleotide
  source 1..20: mol_type = other RNA
tcaaggaagatggcatttct

SEQ ID NO: 1285 - RNA, 20 nt, synthetic construct
  misc_feature 1..20: note = Description of Artificial Sequence: Synthetic oligonucleotide
  source 1..20: mol_type = other RNA
tcaaggaagatggcatttct

SEQ ID NO: 1286 - RNA, 20 nt, synthetic construct
  misc_feature 1..20: note = Description of Artificial Sequence: Synthetic oligonucleotide
  source 1..20: mol_type = other RNA
tcaaggaagatggcatttct

SEQ ID NO: 1287 - RNA, 20 nt, synthetic construct
  misc_feature 1..20: note = Description of Artificial Sequence: Synthetic oligonucleotide
  source 1..20: mol_type = other RNA
tcaaggaagatggcatttct

SEQ ID NO: 1288 - RNA, 20 nt, synthetic construct
  misc_feature 1..20: note = Description of Artificial Sequence: Synthetic oligonucleotide
  source 1..20: mol_type = other RNA
tcaaggaagatggcatttct

SEQ ID NO: 1289 - RNA, 20 nt, synthetic construct
  misc_feature 1..20: note = Description of Artificial Sequence: Synthetic oligonucleotide
  source 1..20: mol_type = other RNA
tcaaggaagatggcatttct

SEQ ID NO: 1290 - RNA, 20 nt, synthetic construct
  misc_feature 1..20: note = Description of Artificial Sequence: Synthetic oligonucleotide
  source 1..20: mol_type = other RNA
tcaaggaagatggcatttct

SEQ ID NO: 1291 - RNA, 20 nt, synthetic construct
  misc_feature 1..20: note = Description of Artificial Sequence: Synthetic oligonucleotide
  source 1..20: mol_type = other RNA
tcaaggaagatggcatttct

SEQ ID NO: 1292 - RNA, 20 nt, synthetic construct
  misc_feature 1..20: note = Description of Artificial Sequence: Synthetic oligonucleotide
  source 1..20: mol_type = other RNA
tcaaggaagatggcatttct

SEQ ID NO: 1293 - RNA, 20 nt, synthetic construct
  misc_feature 1..20: note = Description of Artificial Sequence: Synthetic oligonucleotide
  source 1..20: mol_type = other RNA
tcaaggaagatggcatttct

SEQ ID NO: 1294 - RNA, 20 nt, synthetic construct
  misc_feature 1..20: note = Description of Artificial Sequence: Synthetic oligonucleotide
  source 1..20: mol_type = other RNA
tcaaggaagatggcatttct

SEQ ID NO: 1295 - RNA, 20 nt, synthetic construct
  misc_feature 1..20: note = Description of Artificial Sequence: Synthetic oligonucleotide
  source 1..20: mol_type = other RNA
tcaaggaagatggcatttct

SEQ ID NO: 1296 - RNA, 30 nt, synthetic construct; identical to SEQ ID NO: 544
  misc_feature 1..30: note = Description of Artificial Sequence: Synthetic oligonucleotide
  source 1..30: mol_type = other RNA

SEQ ID NO: 1297 - RNA, 20 nt, synthetic construct
  misc_feature 1..20: note = Description of Artificial Sequence: Synthetic oligonucleotide
  source 1..20: mol_type = other RNA
tcaaggaagatggcatttct

SEQ ID NO: 1298 - RNA, 20 nt, synthetic construct
  misc_feature 1..20: note = Description of Artificial Sequence: Synthetic oligonucleotide
  source 1..20: mol_type = other RNA
tcaaggaagatggcatttct

SEQ ID NO: 1299 - RNA, 20 nt, synthetic construct
  misc_feature 1..20: note = Description of Artificial Sequence: Synthetic oligonucleotide
  source 1..20: mol_type = other RNA
tcaaggaagatggcatttct

SEQ ID NO: 1300 - RNA, 20 nt, synthetic construct
  misc_feature 1..20: note = Description of Artificial Sequence: Synthetic oligonucleotide
  source 1..20: mol_type = other RNA
tcaaggaagatggcatttct

SEQ ID NO: 1301 - RNA, 20 nt, synthetic construct
  misc_feature 1..20: note = Description of Artificial Sequence: Synthetic oligonucleotide
  source 1..20: mol_type = other RNA
ccttccctgaaggttcctcc

SEQ ID NO: 1302 - RNA, 20 nt, synthetic construct
  misc_feature 1..20: note = Description of Artificial Sequence: Synthetic oligonucleotide
  source 1..20: mol_type = other RNA
ccttccctgaaggttcctcc

SEQ ID NO: 1303 - RNA, 20 nt, synthetic construct
  misc_feature 1..20: note = Description of Artificial Sequence: Synthetic oligonucleotide
  source 1..20: mol_type = other RNA
ccttccctgaaggttcctcc

SEQ ID NO: 1304 - RNA, 20 nt, synthetic construct
  misc_feature 1..20: note = Description of Artificial Sequence: Synthetic oligonucleotide
  source 1..20: mol_type = other RNA
ccttccctgaaggttcctcc

SEQ ID NO: 1305 - RNA, 20 nt, synthetic construct
  misc_feature 1..20: note = Description of Artificial Sequence: Synthetic oligonucleotide
  source 1..20: mol_type = other RNA
ccttccctgaaggttcctcc

SEQ ID NO: 1306 - RNA, 20 nt, synthetic construct
  misc_feature 1..20: note = Description of Artificial Sequence: Synthetic oligonucleotide
  source 1..20: mol_type = other RNA
ccttccctgaaggttcctcc

SEQ ID NO: 1307 - RNA, 20 nt, synthetic construct
  misc_feature 1..20: note = Description of Artificial Sequence: Synthetic oligonucleotide
  source 1..20: mol_type = other RNA
tcaaggaagatggcatttct

SEQ ID NO: 1308 - RNA, 20 nt, synthetic construct
  misc_feature 1..20: note = Description of Artificial Sequence: Synthetic oligonucleotide
  source 1..20: mol_type = other RNA
tcaaggaagatggcatttct

SEQ ID NO: 1309 - RNA, 20 nt, synthetic construct
  misc_feature 1..20: note = Description of Artificial Sequence: Synthetic oligonucleotide
  source 1..20: mol_type = other RNA
tcaaggaagatggcatttct

SEQ ID NO: 1310 - RNA, 19 nt, synthetic construct
  misc_feature 1..19: note = Description of Artificial Sequence: Synthetic oligonucleotide
  source 1..19: mol_type = other RNA
tcaaggaagatggcatttc

SEQ ID NO: 1311 - RNA, 18 nt, synthetic construct
  misc_feature 1..18: note = Description of Artificial Sequence: Synthetic oligonucleotide
  source 1..18: mol_type = other RNA
tcaaggaagatggcattt

SEQ ID NO: 1312 - RNA, 19 nt, synthetic construct
  misc_feature 1..19: note = Description of Artificial Sequence: Synthetic oligonucleotide
  source 1..19: mol_type = other RNA
caaggaagatggcatttct

SEQ ID NO: 1313 - RNA, 20 nt, synthetic construct
  misc_feature 1..20: note = Description of Artificial Sequence: Synthetic oligonucleotide
  source 1..20: mol_type = other RNA
ggccaaacctcggcttacct

SEQ ID NO: 1314 - RNA, 20 nt, synthetic construct
  misc_feature 1..20: note = Description of Artificial Sequence: Synthetic oligonucleotide
  source 1..20: mol_type = other RNA
ggccaaacctcggcttacct

SEQ ID NO: 1315 - RNA, 20 nt, synthetic construct
  misc_feature 1..20: note = Description of Artificial Sequence: Synthetic oligonucleotide
  source 1..20: mol_type = other RNA
ttctgtaaggtttttatgtg

SEQ ID NO: 1316 - RNA, 20 nt, synthetic construct
  misc_feature 1..20: note = Description of Artificial Sequence: Synthetic oligonucleotide
  source 1..20: mol_type = other RNA
atttctgtaaggtttttatg

SEQ ID NO: 1317 - RNA, 20 nt, synthetic construct
  misc_feature 1..20: note = Description of Artificial Sequence: Synthetic oligonucleotide
  source 1..20: mol_type = other RNA
ccatttctgtaaggttttta

SEQ ID NO: 1318 - RNA, 20 nt, synthetic construct
  misc_feature 1..20: note = Description of Artificial Sequence: Synthetic oligonucleotide
  source 1..20: mol_type = other RNA
atccatttctgtaaggtttt

SEQ ID NO: 1319 - RNA, 20 nt, synthetic construct
  misc_feature 1..20: note = Description of Artificial Sequence: Synthetic oligonucleotide
  source 1..20: mol_type = other RNA
catccatttctgtaaggttt

SEQ ID NO: 1320 - RNA, 20 nt, synthetic construct
  misc_feature 1..20: note = Description of Artificial Sequence: Synthetic oligonucleotide
  source 1..20: mol_type = other RNA
ccatccatttctgtaaggtt

SEQ ID NO: 1321 - RNA, 20 nt, synthetic construct
  misc_feature 1..20: note = Description of Artificial Sequence: Synthetic oligonucleotide
  source 1..20: mol_type = other RNA
gccatccatttctgtaaggt

SEQ ID NO: 1322 - RNA, 20 nt, synthetic construct
  misc_feature 1..20: note = Description of Artificial Sequence: Synthetic oligonucleotide
  source 1..20: mol_type = other RNA
agccatccatttctgtaagg

SEQ ID NO: 1323 - RNA, 20 nt, synthetic construct
  misc_feature 1..20: note = Description of Artificial Sequence: Synthetic oligonucleotide
  source 1..20: mol_type = other RNA
cagccatccatttctgtaag

SEQ ID NO: 1324 - RNA, 20 nt, synthetic construct
  misc_feature 1..20: note = Description of Artificial Sequence: Synthetic oligonucleotide
  source 1..20: mol_type = other RNA
tcagccatccatttctgtaa

SEQ ID NO: 1325 - RNA, 20 nt, synthetic construct
  misc_feature 1..20: note = Description of Artificial Sequence: Synthetic oligonucleotide
  source 1..20: mol_type = other RNA
ttcagccatccatttctgta

SEQ ID NO: 1326 - RNA, 20 nt, synthetic construct
  misc_feature 1..20: note = Description of Artificial Sequence: Synthetic oligonucleotide
  source 1..20: mol_type = other RNA
cttcagccatccatttctgt

SEQ ID NO: 1327 - RNA, 20 nt, synthetic construct
  misc_feature 1..20: note = Description of Artificial Sequence: Synthetic oligonucleotide
  source 1..20: mol_type = other RNA
acttcagccatccatttctg

SEQ ID NO: 1328 - RNA, 20 nt, synthetic construct
  misc_feature 1..20: note = Description of Artificial Sequence: Synthetic oligonucleotide
  source 1..20: mol_type = other RNA
aacttcagccatccatttct

SEQ ID NO: 1329 - RNA, 20 nt, synthetic construct
  misc_feature 1..20: note = Description of Artificial Sequence: Synthetic oligonucleotide
  source 1..20: mol_type = other RNA
caacttcagccatccatttc

SEQ ID NO: 1330 - RNA, 20 nt, synthetic construct
  misc_feature 1..20: note = Description of Artificial Sequence: Synthetic oligonucleotide
  source 1..20: mol_type = other RNA
tcaacttcagccatccattt

SEQ ID NO: 1331 - RNA, 20 nt, synthetic construct
  misc_feature 1..20: note = Description of Artificial Sequence: Synthetic oligonucleotide
  source 1..20: mol_type = other RNA
atcaacttcagccatccatt

SEQ ID NO: 1332 - RNA, 20 nt, synthetic construct
  misc_feature 1..20: note = Description of Artificial Sequence: Synthetic oligonucleotide
  source 1..20: mol_type = other RNA
catcaacttcagccatccat

SEQ ID NO: 1333 - RNA, 20 nt, synthetic construct
  misc_feature 1..20: note = Description of Artificial Sequence: Synthetic oligonucleotide
  source 1..20: mol_type = other RNA
acatcaacttcagccatcca

SEQ ID NO: 1334 - RNA, 20 nt, synthetic construct
  misc_feature 1..20: note = Description of Artificial Sequence: Synthetic oligonucleotide
  source 1..20: mol_type = other RNA
aacatcaacttcagccatcc

SEQ ID NO: 1335 - RNA, 20 nt, synthetic construct
  misc_feature 1..20: note = Description of Artificial Sequence: Synthetic oligonucleotide
  source 1..20: mol_type = other RNA
gaaaacatcaacttcagcca

SEQ ID NO: 1336 - RNA, 20 nt, synthetic construct
  misc_feature 1..20: note = Description of Artificial Sequence: Synthetic oligonucleotide
  source 1..20: mol_type = other RNA
caggaaaacatcaacttcag

SEQ ID NO: 1337 - RNA, 20 nt, synthetic construct
  misc_feature 1..20: note = Description of Artificial Sequence: Synthetic oligonucleotide
  source 1..20: mol_type = other RNA
tttcaggaaaacatcaactt

SEQ ID NO: 1338 - RNA, 20 nt, synthetic construct
  misc_feature 1..20: note = Description of Artificial Sequence: Synthetic oligonucleotide
  source 1..20: mol_type = other RNA
ctctttcaggaaaacatcaa

SEQ ID NO: 1339 - RNA, 20 nt, synthetic construct
  misc_feature 1..20: note = Description of Artificial Sequence: Synthetic oligonucleotide
  source 1..20: mol_type = other RNA
ttcctctttcaggaaaacat

SEQ ID NO: 1340 - RNA, 20 nt, synthetic construct
  misc_feature 1..20: note = Description of Artificial Sequence: Synthetic oligonucleotide
  source 1..20: mol_type = other RNA
gccattcctctttcaggaaa

SEQ ID NO: 1341 - RNA, 20 nt, synthetic construct
  misc_feature 1..20: note = Description of Artificial Sequence: Synthetic oligonucleotide
  source 1..20: mol_type = other RNA
ggccattcctctttcaggaa

SEQ ID NO: 1342 - RNA, 20 nt, synthetic construct
  misc_feature 1..20: note = Description of Artificial Sequence: Synthetic oligonucleotide
  source 1..20: mol_type = other RNA
aggccattcctctttcagga

SEQ ID NO: 1343 - RNA, 20 nt, synthetic construct
  misc_feature 1..20: note = Description of Artificial Sequence: Synthetic oligonucleotide
  source 1..20: mol_type = other RNA
caggccattcctctttcagg

SEQ ID NO: 1344 - RNA, 20 nt, synthetic construct
  misc_feature 1..20: note = Description of Artificial Sequence: Synthetic oligonucleotide
  source 1..20: mol_type = other RNA
gcaggccattcctctttcag

SEQ ID NO: 1345 - RNA, 20 nt, synthetic construct
  misc_feature 1..20: note = Description of Artificial Sequence: Synthetic oligonucleotide
  source 1..20: mol_type = other RNA
ggcaggccattcctctttca

SEQ ID NO: 1346 - RNA, 20 nt, synthetic construct
  misc_feature 1..20: note = Description of Artificial Sequence: Synthetic oligonucleotide
  source 1..20: mol_type = other RNA
gggcaggccattcctctttc

SEQ ID NO: 1347 - RNA, 20 nt, synthetic construct
  misc_feature 1..20: note = Description of Artificial Sequence: Synthetic oligonucleotide
  source 1..20: mol_type = other RNA
agggcaggccattcctcttt

SEQ ID NO: 1348 - RNA, 20 nt, synthetic construct
  misc_feature 1..20: note = Description of Artificial Sequence: Synthetic oligonucleotide
  source 1..20: mol_type = other RNA
cagggcaggccattcctctt

SEQ ID NO: 1349 - RNA, 20 nt, synthetic construct
  misc_feature 1..20: note = Description of Artificial Sequence: Synthetic oligonucleotide
  source 1..20: mol_type = other RNA
ccagggcaggccattcctct

SEQ ID NO: 1350 - RNA, 20 nt, synthetic construct
  misc_feature 1..20: note = Description of Artificial Sequence: Synthetic oligonucleotide
  source 1..20: mol_type = other RNA
cccagggcaggccattcctc

SEQ ID NO: 1351 - RNA, 20 nt, synthetic construct
  misc_feature 1..20: note = Description of Artificial Sequence: Synthetic oligonucleotide
  source 1..20: mol_type = other RNA
ccccagggcaggccattcct

SEQ ID NO: 1352 - RNA, 20 nt, synthetic construct
  misc_feature 1..20: note = Description of Artificial Sequence: Synthetic oligonucleotide
  source 1..20: mol_type = other RNA
cccccagggcaggccattcc

SEQ ID NO: 1353 - RNA, 20 nt, synthetic construct
  misc_feature 1..20: note = Description of Artificial Sequence: Synthetic oligonucleotide
  source 1..20: mol_type = other RNA
tcccccagggcaggccattc

SEQ ID NO: 1354 - RNA, 20 nt, synthetic construct
  misc_feature 1..20: note = Description of Artificial Sequence: Synthetic oligonucleotide
  source 1..20: mol_type = other RNA
atcccccagggcaggccatt

SEQ ID NO: 1355 - RNA, 20 nt, synthetic construct
  misc_feature 1..20: note = Description of Artificial Sequence: Synthetic oligonucleotide
  source 1..20: mol_type = other RNA
catcccccagggcaggccat

SEQ ID NO: 1356 - RNA, 20 nt, synthetic construct
  misc_feature 1..20: note = Description of Artificial Sequence: Synthetic oligonucleotide
  source 1..20: mol_type = other RNA
gcatcccccagggcaggcca

SEQ ID NO: 1357 - RNA, 20 nt, synthetic construct
  misc_feature 1..20: note = Description of Artificial Sequence: Synthetic oligonucleotide
  source 1..20: mol_type = other RNA
agcatcccccagggcaggcc

SEQ ID NO: 1358 - RNA, 20 nt, synthetic construct
  misc_feature 1..20: note = Description of Artificial Sequence: Synthetic oligonucleotide
  source 1..20: mol_type = other RNA
cagcatcccccagggcaggc

SEQ ID NO: 1359 - RNA, 20 nt, synthetic construct
  misc_feature 1..20: note = Description of Artificial Sequence: Synthetic oligonucleotide
  source 1..20: mol_type = other RNA
tcagcatcccccagggcagg

SEQ ID NO: 1360 - RNA, 20 nt, synthetic construct
  misc_feature 1..20: note = Description of Artificial Sequence: Synthetic oligonucleotide
  source 1..20: mol_type = other RNA
ttcagcatcccccagggcag

SEQ ID NO: 1361 - RNA, 20 nt, synthetic construct
  misc_feature 1..20: note = Description of Artificial Sequence: Synthetic oligonucleotide
  source 1..20: mol_type = other RNA
tttcagcatcccccagggca

SEQ ID NO: 1362 - RNA, 20 nt, synthetic construct
  misc_feature 1..20: note = Description of Artificial Sequence: Synthetic oligonucleotide
  source 1..20: mol_type = other RNA
atttcagcatcccccagggc

SEQ ID NO: 1363 - RNA, 20 nt, synthetic construct
  misc_feature 1..20: note = Description of Artificial Sequence: Synthetic oligonucleotide
  source 1..20: mol_type = other RNA
gatttcagcatcccccaggg

SEQ ID NO: 1364 - RNA, 20 nt, synthetic construct
  misc_feature 1..20: note = Description of Artificial Sequence: Synthetic oligonucleotide
  source 1..20: mol_type = other RNA
ggatttcagcatcccccagg

SEQ ID NO: 1365 - RNA, 20 nt, synthetic construct
  misc_feature 1..20: note = Description of Artificial Sequence: Synthetic oligonucleotide
  source 1..20: mol_type = other RNA
aggatttcagcatcccccag

SEQ ID NO: 1366 - RNA, 20 nt, synthetic construct
  misc_feature 1..20: note = Description of Artificial Sequence: Synthetic oligonucleotide
  source 1..20: mol_type = other RNA
caggatttcagcatccccca

SEQ ID NO: 1367 - RNA, 20 nt, synthetic construct
  misc_feature 1..20: note = Description of Artificial Sequence: Synthetic oligonucleotide
  source 1..20: mol_type = other RNA
tcaggatttcagcatccccc

SEQ ID NO: 1368 - RNA, 20 nt, synthetic construct
  misc_feature 1..20: note = Description of Artificial Sequence: Synthetic oligonucleotide
  source 1..20: mol_type = other RNA
ttcaggatttcagcatcccc

SEQ ID NO: 1369 - RNA, 20 nt, synthetic construct
  misc_feature 1..20: note = Description of Artificial Sequence: Synthetic oligonucleotide
  source 1..20: mol_type = other RNA
tttcaggatttcagcatccc

SEQ ID NO: 1370 - RNA, 20 nt, synthetic construct
  misc_feature 1..20: note = Description of Artificial Sequence: Synthetic oligonucleotide
  source 1..20: mol_type = other RNA
ttttcaggatttcagcatcc

SEQ ID NO: 1371 - RNA, 20 nt, synthetic construct
  misc_feature 1..20: note = Description of Artificial Sequence: Synthetic oligonucleotide
  source 1..20: mol_type = other RNA
tttttcaggatttcagcatc

SEQ ID NO: 1372 - RNA, 20 nt, synthetic construct
  misc_feature 1..20: note = Description of Artificial Sequence: Synthetic oligonucleotide
  source 1..20: mol_type = other RNA
ttttttcaggatttcagcat

SEQ ID NO: 1373 - RNA, 20 nt, synthetic construct
  misc_feature 1..20: note = Description of Artificial Sequence: Synthetic oligonucleotide
  source 1..20: mol_type = other RNA
gttttttcaggatttcagca

SEQ ID NO: 1374 - RNA, 20 nt, synthetic construct
  misc_feature 1..20: note = Description of Artificial Sequence: Synthetic oligonucleotide
  source 1..20: mol_type = other RNA
tgttttttcaggatttcagc

SEQ ID NO: 1375 - RNA, 20 nt, synthetic construct
  misc_feature 1..20: note = Description of Artificial Sequence: Synthetic oligonucleotide
  source 1..20: mol_type = other RNA
ctgttttttcaggatttcag

SEQ ID NO: 1376 - RNA, 20 nt, synthetic construct
  misc_feature 1..20: note = Description of Artificial Sequence: Synthetic oligonucleotide
  source 1..20: mol_type = other RNA
gctgttttttcaggatttca

SEQ ID NO: 1377 - RNA, 20 nt, synthetic construct
  misc_feature 1..20: note = Description of Artificial Sequence: Synthetic oligonucleotide
  source 1..20: mol_type = other RNA
agctgttttttcaggatttc

SEQ ID NO: 1378 - RNA, 20 nt, synthetic construct
  misc_feature 1..20: note = Description of Artificial Sequence: Synthetic oligonucleotide
  source 1..20: mol_type = other RNA
gagctgttttttcaggattt

SEQ ID NO: 1379 - RNA, 20 nt, synthetic construct
  misc_feature 1..20: note = Description of Artificial Sequence: Synthetic oligonucleotide
  source 1..20: mol_type = other RNA
tgagctgttttttcaggatt

SEQ ID NO: 1380 - RNA, 20 nt, synthetic construct
  misc_feature 1..20: note = Description of Artificial Sequence: Synthetic oligonucleotide
  source 1..20: mol_type = other RNA
ttgagctgttttttcaggat

SEQ ID NO: 1381 - RNA, 20 nt, synthetic construct
  misc_feature 1..20: note = Description of Artificial Sequence: Synthetic oligonucleotide
  source 1..20: mol_type = other RNA
tttgagctgttttttcagga

SEQ ID NO: 1382 - RNA, 20 nt, synthetic construct
  misc_feature 1..20: note = Description of Artificial Sequence: Synthetic oligonucleotide
  source 1..20: mol_type = other RNA
gtttgagctgttttttcagg

SEQ ID NO: 1383 - RNA, 20 nt, synthetic construct
  misc_feature 1..20: note = Description of Artificial Sequence: Synthetic oligonucleotide
  source 1..20: mol_type = other RNA
ttgtttgagctgttttttca

SEQ ID NO: 1384 - RNA, 20 nt, synthetic construct
  misc_feature 1..20: note = Description of Artificial Sequence: Synthetic oligonucleotide
  source 1..20: mol_type = other RNA
cattgtttgagctgtttttt

SEQ ID NO: 1385 - RNA, 20 nt, synthetic construct
  misc_feature 1..20: note = Description of Artificial Sequence: Synthetic oligonucleotide
  source 1..20: mol_type = other RNA
gcattgtttgagctgttttt

SEQ ID NO: 1386 - RNA, 20 nt, synthetic construct
  misc_feature 1..20: note = Description of Artificial Sequence: Synthetic oligonucleotide
  source 1..20: mol_type = other RNA
tgcattgtttgagctgtttt

SEQ ID NO: 1387 - RNA, 20 nt, synthetic construct
  misc_feature 1..20: note = Description of Artificial Sequence: Synthetic oligonucleotide
  source 1..20: mol_type = other RNA
ctgcattgtttgagctgttt

SEQ ID NO: 1388 - RNA, 20 nt, synthetic construct
  misc_feature 1..20: note = Description of Artificial Sequence: Synthetic oligonucleotide
  source 1..20: mol_type = other RNA
tctgcattgtttgagctgtt

SEQ ID NO: 1389 - RNA, 20 nt, synthetic construct
  misc_feature 1..20: note = Description of Artificial Sequence: Synthetic oligonucleotide
  source 1..20: mol_type = other RNA
ctctgcattgtttgagctgt

SEQ ID NO: 1390 - RNA, 20 nt, synthetic construct
  misc_feature 1..20: note = Description of Artificial Sequence: Synthetic oligonucleotide
  source 1..20: mol_type = other RNA
actctgcattgtttgagctg

SEQ ID NO: 1391 - RNA, 20 nt, synthetic construct
  misc_feature 1..20: note = Description of Artificial Sequence: Synthetic oligonucleotide
  source 1..20: mol_type = other RNA
tactctgcattgtttgagct

SEQ ID NO: 1392 - RNA, 20 nt, synthetic construct
  misc_feature 1..20: note = Description of Artificial Sequence: Synthetic oligonucleotide
  source 1..20: mol_type = other RNA
ttactctgcattgtttgagc

SEQ ID NO: 1393 - RNA, 20 nt, synthetic construct
  misc_feature 1..20: note = Description of Artificial Sequence: Synthetic oligonucleotide
  source 1..20: mol_type = other RNA
cttactctgcattgtttgag

SEQ ID NO: 1394 - RNA, 20 nt, synthetic construct
  misc_feature 1..20: note = Description of Artificial Sequence: Synthetic oligonucleotide
  source 1..20: mol_type = other RNA
tcttactctgcattgtttga

SEQ ID NO: 1395 - RNA, 20 nt, synthetic construct
  misc_feature 1..20: note = Description of Artificial Sequence: Synthetic oligonucleotide
  source 1..20: mol_type = other RNA
atcttactctgcattgtttg

SEQ ID NO: 1396 - RNA, 20 nt, synthetic construct
  misc_feature 1..20: note = Description of Artificial Sequence: Synthetic oligonucleotide
  source 1..20: mol_type = other RNA
aatcttactctgcattgttt

SEQ ID NO: 1397 - RNA, 20 nt, synthetic construct
  misc_feature 1..20: note = Description of Artificial Sequence: Synthetic oligonucleotide
  source 1..20: mol_type = other RNA
caaatcttactctgcattgt

SEQ ID NO: 1398 - RNA, 20 nt, synthetic construct
  misc_feature 1..20: note = Description of Artificial Sequence: Synthetic oligonucleotide
  source 1..20: mol_type = other RNA
gatacaaatcttactctgca

SEQ ID NO: 1399 - DNA, 20 bp, synthetic construct
  misc_feature 1..20: note = Synthetic oligonucleotide
  modified_base 4: mod_base = OTHER; note = uracil
  modified_base 18: mod_base = OTHER; note = uracil
  source 1..20: mol_type = other DNA
gggtcagctgccaatgctag

SEQ ID NO: 1400 - DNA, 20 bp, synthetic construct
  misc_feature 1..20: note = Synthetic oligonucleotide
  modified_base 4: mod_base = OTHER; note = uracil
  modified_base 18: mod_base = OTHER; note = uracil
  source 1..20: mol_type = other DNA
gggtcagctgccaatgctag

SEQ ID NO: 1401 - DNA, 20 bp, synthetic construct
  misc_feature 1..20: note = Synthetic oligonucleotide
  modified_base 4: mod_base = OTHER; note = uracil
  modified_base 18: mod_base = OTHER; note = uracil
  source 1..20: mol_type = other DNA
gggtcagctgccaatgctag

SEQ ID NO: 1402 - DNA, 20 bp, synthetic construct
  misc_feature 1..20: note = Synthetic oligonucleotide
  modified_base 4: mod_base = OTHER; note = uracil
  modified_base 18: mod_base = OTHER; note = uracil
  source 1..20: mol_type = other DNA
gggtcagctgccaatgctag

SEQ ID NO: 1403 - DNA, 20 bp, synthetic construct
  misc_feature 1..20: note = Synthetic oligonucleotide
  modified_base 4: mod_base = OTHER; note = uracil
  source 1..20: mol_type = other DNA
gggtcagctgccaatgctag

SEQ ID NO: 1404 - DNA, 20 bp, synthetic construct
  misc_feature 1..20: note = Synthetic oligonucleotide
  modified_base 4: mod_base = OTHER; note = uracil
  source 1..20: mol_type = other DNA
gggtcagctgccaatgctag

SEQ ID NO: 1405 - DNA, 20 bp, synthetic construct
  misc_feature 1..20: note = Synthetic oligonucleotide
  modified_base 18: mod_base = OTHER; note = uracil
  source 1..20: mol_type = other DNA
gggtcagctgccaatgctag

SEQ ID NO: 1406 - DNA, 20 bp, synthetic construct
  misc_feature 1..20: note = Synthetic oligonucleotide
  modified_base 18: mod_base = OTHER; note = uracil
  source 1..20: mol_type = other DNA
gggtcagctgccaatgctag

SEQ ID NO: 1407 - DNA, 20 bp, synthetic construct
  misc_feature 1..20: note = Synthetic oligonucleotide
  modified_base 4: mod_base = OTHER; note = uracil
  modified_base 18: mod_base = OTHER; note = uracil
  source 1..20: mol_type = other DNA
gggtcagctgccaatgctag

SEQ ID NO: 1408 - DNA, 20 bp, synthetic construct
  misc_feature 1..20: note = Synthetic oligonucleotide
  modified_base 4: mod_base = OTHER; note = uracil
  modified_base 18: mod_base = OTHER; note = uracil
  source 1..20: mol_type = other DNA
gggtcagctgccaatgctag

SEQ ID NO: 1409 - DNA, 20 bp, synthetic construct
  misc_feature 1..20: note = Description of Artificial Sequence: Synthetic oligonucleotide
  source 1..20: mol_type = other DNA
gggtcagctgccaatgctag

SEQ ID NO: 1410 - DNA, 20 bp, synthetic construct
  misc_feature 1..20: note = Description of Artificial Sequence: Synthetic oligonucleotide
  source 1..20: mol_type = other DNA
gggtcagctgccaatgctag

SEQ ID NO: 1411 - DNA, 20 bp, synthetic construct
  misc_feature 1..20: note = Synthetic oligonucleotide
  modified_base 4: mod_base = OTHER; note = uracil
  modified_base 18: mod_base = OTHER; note = uracil
  source 1..20: mol_type = other DNA
gggtcagctgccaatgctag

SEQ ID NO: 1412 - DNA, 20 bp, synthetic construct
  misc_feature 1..20: note = Synthetic oligonucleotide
  modified_base 4: mod_base = OTHER; note = uracil
  modified_base 18: mod_base = OTHER; note = uracil
  source 1..20: mol_type = other DNA
gggtcagctgccaatgctag

SEQ ID NO: 1413 - DNA, 20 bp, synthetic construct
  misc_feature 1..20: note = Synthetic oligonucleotide
  modified_base 4: mod_base = OTHER; note = uracil
  modified_base 18: mod_base = OTHER; note = uracil
  source 1..20: mol_type = other DNA
gggtcagctgccaatgctag

SEQ ID NO: 1414 - DNA, 20 bp, synthetic construct
  misc_feature 1..20: note = Synthetic oligonucleotide
  modified_base 4: mod_base = OTHER; note = uracil
  modified_base 18: mod_base = OTHER; note = uracil
  source 1..20: mol_type = other DNA
gggtcagctgccaatgctag

SEQ ID NO: 1415 - DNA, 20 bp, synthetic construct
  misc_feature 1..20: note = Synthetic oligonucleotide
  modified_base 4: mod_base = OTHER; note = uracil
  modified_base 18: mod_base = OTHER; note = uracil
  source 1..20: mol_type = other DNA
gggtcagctgccaatgctag

SEQ ID NO: 1416 - DNA, 20 bp, synthetic construct
  misc_feature 1..20: note = Synthetic oligonucleotide
  modified_base 4: mod_base = OTHER; note = uracil
  modified_base 18: mod_base = OTHER; note = uracil
  source 1..20: mol_type = other DNA
gggtcagctgccaatgctag

SEQ ID NO: 1417 - DNA, 20 bp, synthetic construct
  misc_feature 1..20: note = Synthetic oligonucleotide
  modified_base 4: mod_base = OTHER; note = uracil
  modified_base 18: mod_base = OTHER; note = uracil
  source 1..20: mol_type = other DNA
gggtcagctgccaatgctag

SEQ ID NO: 1418 - DNA, 20 bp, synthetic construct
  misc_feature 1..20: note = Synthetic oligonucleotide
  modified_base 4: mod_base = OTHER; note = uracil
  modified_base 18: mod_base = OTHER; note = uracil
  source 1..20: mol_type = other DNA
gggtcagctgccaatgctag

SEQ ID NO: 1419 - DNA, 20 bp, synthetic construct
  misc_feature 1..20: note = Synthetic oligonucleotide
  modified_base 4: mod_base = OTHER; note = uracil
  modified_base 18: mod_base = OTHER; note = uracil
  source 1..20: mol_type = other DNA
gggtcagctgccaatgctag

SEQ ID NO: 1420 - DNA, 20 bp, synthetic construct
  misc_feature 1..20: note = Synthetic oligonucleotide
  modified_base 4: mod_base = OTHER; note = uracil
  modified_base 18: mod_base = OTHER; note = uracil
  source 1..20: mol_type = other DNA
gggtcagctgccaatgctag

SEQ ID NO: 1421 - DNA, 20 bp, synthetic construct
  misc_feature 1..20: note = Synthetic oligonucleotide
  modified_base 4: mod_base = OTHER; note = uracil
  modified_base 18: mod_base = OTHER; note = uracil
  source 1..20: mol_type = other DNA
gggtcagctgccaatgctag

SEQ ID NO: 1422 - DNA, 20 bp, synthetic construct
  misc_feature 1..20: note = Synthetic oligonucleotide
  modified_base 4: mod_base = OTHER; note = uracil
  modified_base 18: mod_base = OTHER; note = uracil
  source 1..20: mol_type = other DNA
gggtcagctgccaatgctag

SEQ ID NO: 1423 - DNA, 20 bp, synthetic construct
  misc_feature 1..20: note = Synthetic oligonucleotide
  modified_base 4: mod_base = OTHER; note = uracil
  modified_base 18: mod_base = OTHER; note = uracil
  source 1..20: mol_type = other DNA
gggtcagctgccaatgctag

SEQ ID NO: 1424 - DNA, 20 bp, synthetic construct
  misc_feature 1..20: note = Synthetic oligonucleotide
  modified_base 4: mod_base = OTHER; note = uracil
  modified_base 18: mod_base = OTHER; note = uracil
  source 1..20: mol_type = other DNA
gggtcagctgccaatgctag

SEQ ID NO: 1425 - DNA, 20 bp, synthetic construct
  misc_feature 1..20: note = Synthetic oligonucleotide
  modified_base 4: mod_base = OTHER; note = uracil
  modified_base 18: mod_base = OTHER; note = uracil
  source 1..20: mol_type = other DNA
gggtcagctgccaatgctag

SEQ ID NO: 1426 - DNA, 20 bp, synthetic construct
  misc_feature 1..20: note = Synthetic oligonucleotide
  modified_base 4: mod_base = OTHER; note = uracil
  modified_base 18: mod_base = OTHER; note = uracil
  source 1..20: mol_type = other DNA
gggtcagctgccaatgctag

SEQ ID NO: 1427 - DNA, 20 bp, synthetic construct
  misc_feature 1..20: note = Synthetic oligonucleotide
  modified_base 4: mod_base = OTHER; note = uracil
  modified_base 18: mod_base = OTHER; note = uracil
  source 1..20: mol_type = other DNA
gggtcagctgccaatgctag

SEQ ID NO: 1428 - DNA, 20 bp, synthetic construct
  misc_feature 1..20: note = Synthetic oligonucleotide
  modified_base 4: mod_base = OTHER; note = uracil
  modified_base 18: mod_base = OTHER; note = uracil
  source 1..20: mol_type = other DNA
gggtcagctgccaatgctag

SEQ ID NO: 1429 - DNA, 20 bp, synthetic construct
  misc_feature 1..20: note = Synthetic oligonucleotide
  modified_base 4: mod_base = OTHER; note = uracil
  modified_base 18: mod_base = OTHER; note = uracil
  source 1..20: mol_type = other DNA
gggtcagctgccaatgctag

SEQ ID NO: 1430 - DNA, 20 bp, synthetic construct
  misc_feature 1..20: note = Synthetic oligonucleotide
  modified_base 4: mod_base = OTHER; note = uracil
  modified_base 18: mod_base = OTHER; note = uracil
  source 1..20: mol_type = other DNA
gggtcagctgccaatgctag

SEQ ID NO: 1431 - DNA, 20 bp, synthetic construct
  misc_feature 1..20: note = Synthetic oligonucleotide
  modified_base 4: mod_base = OTHER; note = uracil
  modified_base 18: mod_base = OTHER; note = uracil
  source 1..20: mol_type = other DNA
gggtcagctgccaatgctag

SEQ ID NO: 1432 - DNA, 20 bp, synthetic construct
  misc_feature 1..20: note = Synthetic oligonucleotide
  modified_base 4: mod_base = OTHER; note = uracil
  modified_base 18: mod_base = OTHER; note = uracil
  source 1..20: mol_type = other DNA
gggtcagctgccaatgctag

SEQ ID NO: 1433 - DNA, 20 bp, synthetic construct
  misc_feature 1..20: note = Synthetic oligonucleotide
  modified_base 4: mod_base = OTHER; note = uracil
  modified_base 18: mod_base = OTHER; note = uracil
  source 1..20: mol_type = other DNA
gggtcagctgccaatgctag

SEQ ID NO: 1434 - DNA, 20 bp, synthetic construct
  misc_feature 1..20: note = Synthetic oligonucleotide
  modified_base 4: mod_base = OTHER; note = uracil
  modified_base 18: mod_base = OTHER; note = uracil
  source 1..20: mol_type = other DNA
gggtcagctgccaatgctag

SEQ ID NO: 1435 - DNA, 20 bp, synthetic construct
  misc_feature 1..20: note = Synthetic oligonucleotide
  modified_base 4: mod_base = OTHER; note = uracil
  modified_base 18: mod_base = OTHER; note = uracil
  source 1..20: mol_type = other DNA
gggtcagctgccaatgctag

SEQ ID NO: 1436 - DNA, 20 bp, synthetic construct
  misc_feature 1..20: note = Synthetic oligonucleotide
  modified_base 4: mod_base = OTHER; note = uracil
  modified_base 18: mod_base = OTHER; note = uracil
  source 1..20: mol_type = other DNA
gggtcagctgccaatgctag

SEQ ID NO: 1437 - DNA, 20 bp, synthetic construct
  misc_feature 1..20: note = Synthetic oligonucleotide
  modified_base 4: mod_base = OTHER; note = uracil
  modified_base 18: mod_base = OTHER; note = uracil
  source 1..20: mol_type = other DNA
gggtcagctgccaatgctag

SEQ ID NO: 1438 - DNA, 20 bp, synthetic construct
  misc_feature 1..20: note = Synthetic oligonucleotide
  modified_base 4: mod_base = OTHER; note = uracil
  modified_base 18: mod_base = OTHER; note = uracil
  source 1..20: mol_type = other DNA
gggtcagctgccaatgctag

SEQ ID NO: 1439 - RNA, 20 nt, synthetic construct
  misc_feature 1..20: note = Description of Artificial Sequence: Synthetic oligonucleotide
  source 1..20: mol_type = other RNA
ctagcattggcagctgaccc

SEQ ID NO: 1440 - DNA, 20 bp, synthetic construct
  misc_feature 1..20: note = Description of Artificial Sequence: Synthetic oligonucleotide
  source 1..20: mol_type = other DNA
gggtcagctgccaatgctag

SEQ ID NO: 1441 - DNA, 20 bp, synthetic construct
  misc_feature 1..20: note = Synthetic oligonucleotide
  modified_base 4: mod_base = OTHER; note = uracil
  modified_base 18: mod_base = OTHER; note = uracil
  source 1..20: mol_type = other DNA
gggtcagctgccaatgctag

SEQ ID NO: 1442 - DNA, 20 bp, synthetic construct
  misc_feature 1..20: note = Synthetic oligonucleotide
  modified_base 4: mod_base = OTHER; note = uracil
  modified_base 18: mod_base = OTHER; note = uracil
  source 1..20: mol_type = other DNA
gggtcagctgccaatgctag

SEQ ID NO: 1443 - DNA, 20 bp, synthetic construct
  misc_feature 1..20: note = Description of Artificial Sequence: Synthetic oligonucleotide
  source 1..20: mol_type = other DNA
gggtcagctgccaatgctag

SEQ ID NO: 1444 - DNA, 20 bp, synthetic construct
  misc_feature 1..20: note = Description of Artificial Sequence: Synthetic oligonucleotide
  source 1..20: mol_type = other DNA
gggtcagctgccaatgctag

SEQ ID NO: 1445 - DNA, 20 bp, synthetic construct
  misc_feature 1..20: note = Description of Artificial Sequence: Synthetic oligonucleotide
  source 1..20: mol_type = other DNA
gggtcagctgccaatgctag

SEQ ID NO: 1446 - DNA, 20 bp, synthetic construct
  misc_feature 1..20: note = Description of Artificial Sequence: Synthetic oligonucleotide
  source 1..20: mol_type = other DNA
gggtcagctgccaatgctag

SEQ ID NO: 1447 - DNA, 20 bp, synthetic construct
  misc_feature 1..20: note = Description of Artificial Sequence: Synthetic oligonucleotide
  source 1..20: mol_type = other DNA
gggtcagctgccaatgctag

SEQ ID NO: 1448 - DNA, 20 bp, synthetic construct
  misc_feature 1..20: note = Description of Artificial Sequence: Synthetic oligonucleotide
  source 1..20: mol_type = other DNA
gggtcagctgccaatgctag

SEQ ID NO: 1449 - DNA, 20 bp, synthetic construct
  misc_feature 1..20: note = Description of Artificial Sequence: Synthetic oligonucleotide
  source 1..20: mol_type = other DNA
gggtcagctgccaatgctag

SEQ ID NO: 1450 - DNA, 20 bp, synthetic construct
  misc_feature 1..20: note = Description of Artificial Sequence: Synthetic oligonucleotide
  source 1..20: mol_type = other DNA
gggtcagctgccaatgctag

SEQ ID NO: 1451 - DNA, 20 bp, synthetic construct
  misc_feature 1..20: note = Description of Artificial Sequence: Synthetic oligonucleotide
  source 1..20: mol_type = other DNA
gggtcagctgccaatgctag

SEQ ID NO: 1452 - DNA, 20 bp, synthetic construct
  misc_feature 1..20: note = Description of Artificial Sequence: Synthetic oligonucleotide
  source 1..20: mol_type = other DNA
gggtcagctgccaatgctag

SEQ ID NO: 1453 - DNA, 20 bp, synthetic construct
  misc_feature 1..20: note = Description of Artificial Sequence: Synthetic oligonucleotide
  source 1..20: mol_type = other DNA
gggtcagctgccaatgctag

SEQ ID NO: 1454 - DNA, 20 bp, synthetic construct
  misc_feature 1..20: note = Description of Artificial Sequence: Synthetic oligonucleotide
  source 1..20: mol_type = other DNA
gggtcagctgccaatgctag

SEQ ID NO: 1455 - DNA, 20 bp, synthetic construct
  misc_feature 1..20: note = Description of Artificial Sequence: Synthetic oligonucleotide
  source 1..20: mol_type = other DNA
gggtcagctgccaatgctag

SEQ ID NO: 1456 - DNA, 20 bp, synthetic construct
  misc_feature 1..20: note = Description of Artificial Sequence: Synthetic oligonucleotide
  source 1..20: mol_type = other DNA
gggtcagctgccaatgctag

SEQ ID NO: 1457 - DNA, 20 bp, synthetic construct
  misc_feature 1..20: note = Description of Artificial Sequence: Synthetic oligonucleotide
  source 1..20: mol_type = other DNA
gggtcagctgccaatgctag

SEQ ID NO: 1458 - DNA, 20 bp, synthetic construct
  misc_feature 1..20: note = Description of Artificial Sequence: Synthetic oligonucleotide
  source 1..20: mol_type = other DNA
gggtcagctgccaatgctag

SEQ ID NO: 1459 - DNA, 20 bp, synthetic construct
  misc_feature 1..20: note = Description of Artificial Sequence: Synthetic oligonucleotide
  source 1..20: mol_type = other DNA
gggtcagctgccaatgctag

SEQ ID NO: 1460 - DNA, 20 bp, synthetic construct
  misc_feature 1..20: note = Description of Artificial Sequence: Synthetic oligonucleotide
  source 1..20: mol_type = other DNA
gggtcagctgccaatgctag

SEQ ID NO: 1461 - DNA, 20 bp, synthetic construct
  misc_feature 1..20: note = Description of Artificial Sequence: Synthetic oligonucleotide
  source 1..20: mol_type = other DNA
gggtcagctgccaatgctag

SEQ ID NO: 1462 - DNA, 20 bp, synthetic construct
  misc_feature 1..20: note = Description of Artificial Sequence: Synthetic oligonucleotide
  source 1..20: mol_type = other DNA
gggtcagctgccaatgctag

SEQ ID NO: 1463 - DNA, 20 bp, synthetic construct
  misc_feature 1..20: note = Description of Artificial Sequence: Synthetic oligonucleotide
  source 1..20: mol_type = other DNA
gggtcagctgccaatgctag

SEQ ID NO: 1464 - DNA, 20 bp, synthetic construct
  misc_feature 1..20: note = Description of Artificial Sequence: Synthetic oligonucleotide
  source 1..20: mol_type = other DNA
gggtcagctgccaatgctag

SEQ ID NO: 1465 - DNA, 20 bp, synthetic construct
  misc_feature 1..20: note = Synthetic oligonucleotide
  modified_base 1: mod_base = OTHER; note = uracil
  modified_base 19: mod_base = OTHER; note = uracil
  source 1..20: mol_type = other DNA
tagcgcccacctcacccctc

SEQ ID NO: 1466 - DNA, 20 bp, synthetic construct
  misc_feature 1..20: note = Synthetic oligonucleotide
  modified_base 1..2: mod_base = OTHER; note = uracil
  modified_base 20: mod_base = OTHER; note = uracil
  source 1..20: mol_type = other DNA
ttagcgcccacctcacccct

SEQ ID NO: 1467 - DNA, 20 bp, synthetic construct
  misc_feature 1..20: note = Synthetic oligonucleotide
  modified_base 2..3: mod_base = OTHER; note = uracil
  source 1..20: mol_type = other DNA
cttagcgcccacctcacccc

SEQ ID NO: 1468 - DNA, 20 bp, synthetic construct
  misc_feature 1..20: note = Description of Artificial Sequence: Synthetic oligonucleotide
  source 1..20: mol_type = other DNA
accccgtcctggaaaccagg

SEQ ID NO: 1469 - DNA, 20 bp, synthetic construct
  misc_feature 1..20: note = Description of Artificial Sequence: Synthetic oligonucleotide
  source 1..20: mol_type = other DNA
ccccgtcctggaaaccagga

SEQ ID NO: 1470 - DNA, 20 bp, synthetic construct
  misc_feature 1..20: note = Synthetic oligonucleotide
  modified_base 3..4: mod_base = OTHER; note = uracil
  source 1..20: mol_type = other DNA
gcttagcgcccacctcaccc

SEQ ID NO: 1471 - RNA, 20 nt, synthetic construct
  misc_feature 1..20: note = Description of Artificial Sequence: Synthetic oligonucleotide
  source 1..20: mol_type = other RNA
ggcttagcgcccacctcacc

SEQ ID NO: 1472 - DNA, 20 bp, synthetic construct
  misc_feature 1..20: note = Synthetic oligonucleotide
  modified_base 5: mod_base = OTHER; note = uracil
  source 1..20: mol_type = other DNA
cccgtcctggaaaccaggag

SEQ ID NO: 1473 - DNA, 20 bp, synthetic construct
  misc_feature 1..20: note = Synthetic oligonucleotide
  modified_base 1: mod_base = OTHER; note = uracil
  source 1..20: mol_type = other DNA
tgaaccccgtcctggaaacc

SEQ ID NO: 1474 - DNA, 20 bp, synthetic construct
  misc_feature 1..20: note = Synthetic oligonucleotide
  modified_base 1..3: mod_base = OTHER; note = uracil
  source 1..20: mol_type = other DNA
tttcccctccctcatcaaca

SEQ ID NO: 1475 - DNA, 20 bp, synthetic construct
  misc_feature 1..20: note = Synthetic oligonucleotide
  modified_base 4: mod_base = OTHER; note = uracil
  modified_base 19: mod_base = OTHER; note = uracil
  source 1..20: mol_type = other DNA
agctccagtccctgaaggtg

SEQ ID NO: 1476 - DNA, 20 bp, synthetic construct
  misc_feature 1..20: note = Synthetic oligonucleotide
  modified_base 5: mod_base = OTHER; note = uracil
  modified_base 17: mod_base = OTHER; note = uracil
  source 1..20: mol_type = other DNA
aggcttagcgcccacctcac

SEQ ID NO: 1477 - DNA, 20 bp, synthetic construct
  misc_feature 1..20: note = Synthetic oligonucleotide
  modified_base 2..4: mod_base = OTHER; note = uracil
  modified_base 16: mod_base = OTHER; note = uracil
  source 1..20: mol_type = other DNA
gtttcccctccctcatcaac

SEQ ID NO: 1478 - DNA, 20 bp, synthetic construct
  misc_feature 1..20: note = Description of Artificial Sequence: Synthetic oligonucleotide
  source 1..20: mol_type = other DNA
aaccccgtcctggaaaccag

SEQ ID NO: 1479 - DNA, 20 bp, synthetic construct
  misc_feature 1..20: note = Description of Artificial Sequence: Synthetic oligonucleotide
  source 1..20: mol_type = other DNA
gaaccccgtcctggaaacca

SEQ ID NO: 1480 - DNA, 20 bp, synthetic construct
  misc_feature 1..20: note = Synthetic oligonucleotide
  modified_base 3: mod_base = OTHER; note = uracil
  modified_base 18: mod_base = OTHER; note = uracil
  modified_base 20: mod_base = OTHER; note = uracil
  source 1..20: mol_type = other DNA
gctccagtccctgaaggtgt

SEQ ID NO: 1481 - DNA, 20 bp, synthetic construct
  misc_feature 1..20: note = Synthetic oligonucleotide
  modified_base 1..2: mod_base = OTHER; note = uracil
  source 1..20: mol_type = other DNA
ttgaaccccgtcctggaaac

SEQ ID NO: 1482 - DNA, 20 bp, synthetic construct
  misc_feature 1..20: note = Synthetic oligonucleotide
  modified_base 1..2: mod_base = OTHER; note = uracil
  source 1..20: mol_type = other DNA
ttcccctccctcatcaacaa

SEQ ID NO: 1483 - DNA, 20 bp, synthetic construct
  misc_feature 1..20: note = Synthetic oligonucleotide
  modified_base 4: mod_base = OTHER; note = uracil
  modified_base 20: mod_base = OTHER; note = uracil
  source 1..20: mol_type = other DNA
ccgtcctggaaaccaggagt

SEQ ID NO: 1484 - DNA, 20 bp, synthetic construct
  misc_feature 1..20: note = Description of Artificial Sequence: Synthetic oligonucleotide
  source 1..20: mol_type = other DNA
gcagctccagtccctgaagg

SEQ ID NO: 1485 - DNA, 20 bp, synthetic construct
  misc_feature 1..20: note = Synthetic oligonucleotide
  modified_base 1: mod_base = OTHER; note = uracil
  modified_base 19: mod_base = OTHER; note = uracil
  source 1..20: mol_type = other DNA
tgccaggctggttatgactc

SEQ ID NO: 1486 - DNA, 20 bp, synthetic construct
  misc_feature 1..20: note = Synthetic oligonucleotide
  modified_base 3: mod_base = OTHER; note = uracil
  modified_base 19: mod_base = OTHER; note = uracil
  source 1..20: mol_type = other DNA
cgtcctggaaaccaggagtg

SEQ ID NO: 1487 - DNA, 20 bp, synthetic construct
  misc_feature 1..20: note = Synthetic oligonucleotide
  modified_base 5: mod_base = OTHER; note = uracil
  modified_base 20: mod_base = OTHER; note = uracil
  source 1..20: mol_type = other DNA
cagctccagtccctgaaggt

SEQ ID NO: 1488 - DNA, 20 bp, synthetic construct
  misc_feature 1..20: note = Synthetic oligonucleotide
  modified_base 2: mod_base = OTHER; note = uracil
  modified_base 16: mod_base = OTHER; note = uracil
  modified_base 20: mod_base = OTHER; note = uracil
  source 1..20: mol_type = other DNA
ctgccaggctggttatgact

SEQ ID NO: 1489 - RNA, 20 nt, synthetic construct
  misc_feature 1..20: note = Description of Artificial Sequence: Synthetic oligonucleotide
  source 1..20: mol_type = other RNA
tcctggaaaccaggagtgcc

SEQ ID NO: 1490 - DNA, 20 bp, synthetic construct
  misc_feature 1..20: note = Synthetic oligonucleotide
  modified_base 18: mod_base = OTHER; note = uracil
  source 1..20: mol_type = other DNA
aaggcttagcgcccacctca

SEQ ID NO: 1491 - DNA, 20 bp, synthetic construct
  misc_feature 1..20: note = Synthetic oligonucleotide
  modified_base 17: mod_base = OTHER; note = uracil
  source 1..20: mol_type = other DNA
ccaggctggttatgactcag

SEQ ID NO: 1492 - RNA, 20 nt, synthetic construct
  misc_feature 1..20: note = Description of Artificial Sequence: Synthetic oligonucleotide
  source 1..20: mol_type = other RNA
cctggaaaccaggagtgcca

SEQ ID NO: 1493 - DNA, 20 bp, synthetic construct
  misc_feature 1..20: note = Synthetic oligonucleotide
  modified_base 18: mod_base = OTHER; note = uracil
  source 1..20: mol_type = other DNA
gccaggctggttatgactca

SEQ ID NO: 1494 - DNA, 20 bp, synthetic construct
  misc_feature 1..20: note = Synthetic oligonucleotide
  modified_base 19: mod_base = OTHER; note = uracil
  source 1..20: mol_type = other DNA
aaaggcttagcgcccacctc

SEQ ID NO: 1495 - DNA, 20 bp, synthetic construct
  misc_feature 1..20: note = Synthetic oligonucleotide
  modified_base 4..5: mod_base = OTHER; note = uracil
  modified_base 16: mod_base = OTHER; note = uracil
  source 1..20: mol_type = other DNA
ggattgggagttacttgcca

SEQ ID NO: 1496 - RNA, 20 nt, synthetic construct
  misc_feature 1..20: note = Description of Artificial Sequence: Synthetic oligonucleotide
  source 1..20: mol_type = other RNA
gtcctggaaaccaggagtgc

SEQ ID NO: 1497 - DNA, 20 bp, synthetic construct
  misc_feature 1..20: note = Synthetic oligonucleotide
  modified_base 16: mod_base = OTHER; note = uracil
  source 1..20: mol_type = other DNA
caggctggttatgactcaga

SEQ ID NO: 1498 - DNA, 20 bp, synthetic construct
  misc_feature 1..20: note = Synthetic oligonucleotide
  modified_base 18..19: mod_base = OTHER; note = uracil
  source 1..20: mol_type = other DNA
gggagttacttgccaacttg

SEQ ID NO: 1499 - DNA, 20 bp, synthetic construct
  misc_feature 1..20: note = Synthetic oligonucleotide
  modified_base 1: mod_base = OTHER; note = uracil
  modified_base 19..20: mod_base = OTHER; note = uracil
  source 1..20: mol_type = other DNA
tgggagttacttgccaactt

SEQ ID NO: 1500 - DNA, 20 bp, synthetic construct
  misc_feature 1..20: note = Synthetic oligonucleotide
  modified_base 1..2: mod_base = OTHER; note = uracil
  modified_base 20: mod_base = OTHER; note = uracil
  source 1..20: mol_type = other DNA
ttgggagttacttgccaact

SEQ ID NO: 1501 - DNA, 20 bp, synthetic construct
  misc_feature 1..20: note = Synthetic oligonucleotide
  modified_base 2..4: mod_base = OTHER; note = uracil
  modified_base 20: mod_base = OTHER; note = uracil
  source 1..20: mol_type = other DNA
atttcctcaacactcagcct

SEQ ID NO: 1502 - DNA, 20 bp, synthetic construct
  misc_feature 1..20: note = Synthetic oligonucleotide
  modified_base 5: mod_base = OTHER; note = uracil
  source 1..20: mol_type = other DNA
cccctccctcatcaacaaaa

SEQ ID NO: 1503 - DNA, 20 bp, synthetic construct
  misc_feature 1..20: note = Synthetic oligonucleotide
  modified_base 4..5: mod_base = OTHER; note = uracil
  modified_base 18..19: mod_base = OTHER; note = uracil
  source 1..20: mol_type = other DNA
acatttccacttgccagtta

SEQ ID NO: 1504 - DNA, 20 bp, synthetic construct
  misc_feature 1..20: note = Synthetic oligonucleotide
  modified_base 20: mod_base = OTHER; note = uracil
  source 1..20: mol_type = other DNA
aaaaggcttagcgcccacct

SEQ ID NO: 1505 - DNA, 20 bp, synthetic construct
  misc_feature 1..20: note = Synthetic oligonucleotide
  modified_base 4: mod_base = OTHER; note = uracil
  source 1..20: mol_type = other DNA
acctgtctgaggcaaacgaa

SEQ ID NO: 1506 - DNA, 20 bp, synthetic construct
  misc_feature 1..20: note = Synthetic oligonucleotide
  modified_base 2..3: mod_base = OTHER; note = uracil
  source 1..20: mol_type = other DNA
attgggagttacttgccaac

SEQ ID NO: 1507 - RNA, 20 nt, synthetic construct
  misc_feature 1..20: note = Description of Artificial Sequence: Synthetic oligonucleotide
  source 1..20: mol_type = other RNA
tcaacaaaagcccaccctct

SEQ ID NO: 1508 - DNA, 20 bp, synthetic construct
  misc_feature 1..20: note = Synthetic oligonucleotide
  modified_base 2: mod_base = OTHER; note = uracil
  source 1..20: mol_type = other DNA
ctaagatgctagcttggcca

SEQ ID NO: 1509 - DNA, 20 bp, synthetic construct
  misc_feature 1..20: note = Description of Artificial Sequence: Synthetic oligonucleotide
  source 1..20: mol_type = other DNA
gggtcagctgccaatgctag

SEQ ID NO: 1510 - DNA, 20 bp, synthetic construct
  misc_feature 1..20: note = Description of Artificial Sequence: Synthetic oligonucleotide
  source 1..20: mol_type = other DNA
gggtcagctgccaatgctag

SEQ ID NO: 1511 - DNA, 20 bp, synthetic construct
  misc_feature 1..20: note = Description of Artificial Sequence: Synthetic oligonucleotide
  source 1..20: mol_type = other DNA
gggtcagctgccaatgctag

SEQ ID NO: 1512 - DNA, 20 bp, synthetic construct
  misc_feature 1..20: note = Description of Artificial Sequence: Synthetic oligonucleotide
  source 1..20: mol_type = other DNA
gggtcagctgccaatgctag

SEQ ID NO: 1513 - DNA, 20 bp, synthetic construct
  misc_feature 1..20: note = Description of Artificial Sequence: Synthetic oligonucleotide
  source 1..20: mol_type = other DNA
gggtcagctgccaatgctag

SEQ ID NO: 1514 - RNA, 20 nt, synthetic construct
  misc_feature 1..20: note = Description of Artificial Sequence: Synthetic oligonucleotide
  source 1..20: mol_type = other RNA
tcaaggaagatggcatttct

SEQ ID NO: 1515 - RNA, 20 nt, synthetic construct
  misc_feature 1..20: note = Description of Artificial Sequence: Synthetic oligonucleotide
  source 1..20: mol_type = other RNA
tcaaggaagatggcatttct

SEQ ID NO: 1516 - RNA, 20 nt, synthetic construct
  misc_feature 1..20: note = Description of Artificial Sequence: Synthetic oligonucleotide
  source 1..20: mol_type = other RNA
tcaaggaagatggcatttct

SEQ ID NO: 1517 - RNA, 20 nt, synthetic construct
  misc_feature 1..20: note = Description of Artificial Sequence: Synthetic oligonucleotide
  source 1..20: mol_type = other RNA
tcaaggaagatggcatttct

SEQ ID NO: 1518 - skipped

SEQ ID NO: 1519 - DNA, 11 bp, synthetic construct
  misc_feature 1..11: note = Description of Artificial Sequence: Synthetic oligonucleotide
  source 1..11: mol_type = other DNA
tttttttttgt

SEQ ID NO: 1520 - DNA, 10 bp, synthetic construct
  misc_feature 1..10: note = Description of Artificial Sequence: Synthetic oligonucleotide
  source 1..10: mol_type = other DNA
tttttttttt

SEQ ID NO: 1521 - DNA, 11 bp, synthetic construct
  misc_feature 1..11: note = Description of Artificial Sequence: Synthetic oligonucleotide
  source 1..11: mol_type = other DNA
ttcctgatgct

SEQ ID NO: 1522 - DNA, 13 bp, synthetic construct
  misc_feature 1..13: note = Description of Artificial Sequence: Synthetic oligonucleotide
  source 1..13: mol_type = other DNA
ttttttttttttt

SEQ ID NO: 1523 - skipped

SEQ ID NO: 1524 - DNA, 21 bp, synthetic construct
  misc_feature 1..21: note = Description of Artificial Sequence: Synthetic oligonucleotide
  source 1..21: mol_type = other DNA
gtcgccccttctccccgcagc

SEQ ID NO: 1525 - DNA, 10 bp, synthetic construct
  misc_feature 1..10: note = Description of Artificial Sequence: Synthetic oligonucleotide
  source 1..10: mol_type = other DNA
gtcgcccctt

SEQ ID NO: 1526 - DNA, 13 bp, synthetic construct
  misc_feature 1..13: note = Description of Artificial Sequence: Synthetic oligonucleotide
  source 1..13: mol_type = other DNA
tcgccccttctcc

SEQ ID NO: 1527 - DNA, 10 bp, synthetic construct
  misc_feature 1..10: note = Description of Artificial Sequence: Synthetic oligonucleotide
  source 1..10: mol_type = other DNA
ctccccgcag

SEQ ID NO: 1528 - DNA, 15 bp, synthetic construct
  misc_feature 1..15: note = Description of Artificial Sequence: Synthetic oligonucleotide
  source 1..15: mol_type = other DNA
ccttctccccgcagc

SEQ ID NO: 1529 - DNA, 12 bp, synthetic construct
  misc_feature 1..12: note = Description of Artificial Sequence: Synthetic oligonucleotide
  source 1..12: mol_type = other DNA
tcgccccttctc

SEQ ID NO: 1530 - DNA, 10 bp, synthetic construct
  misc_feature 1..10: note = Description of Artificial Sequence: Synthetic oligonucleotide
  source 1..10: mol_type = other DNA
ttctccccgc

SEQ ID NO: 1531 - DNA, 12 bp, synthetic construct
  misc_feature 1..12: note = Description of Artificial Sequence: Synthetic oligonucleotide
  source 1..12: mol_type = other DNA
gtcgccccttct

SEQ ID NO: 1532 - DNA, 13 bp, synthetic construct
  misc_feature 1..13: note = Description of Artificial Sequence: Synthetic oligonucleotide
  source 1..13: mol_type = other DNA
cccttctccccgc

SEQ ID NO: 1533 - DNA, 10 bp, synthetic construct
  misc_feature 1..10: note = Description of Artificial Sequence: Synthetic oligonucleotide
  source 1..10: mol_type = other DNA
tctccccgca

SEQ ID NO: 1534 - DNA, 13 bp, synthetic construct
  misc_feature 1..13: note = Description of Artificial Sequence: Synthetic oligonucleotide
  source 1..13: mol_type = other DNA
cttctccccgcag

SEQ ID NO: 1535 - DNA, 18 bp, synthetic construct
  misc_feature 1..18: note = Description of Artificial Sequence: Synthetic oligonucleotide
  source 1..18: mol_type = other DNA
tcgccccttctccccgca

SEQ ID NO: 1536 - DNA, 15 bp, synthetic construct
  misc_feature 1..15: note = Description of Artificial Sequence: Synthetic oligonucleotide
  source 1..15: mol_type = other DNA
cgccccttctccccg

SEQ ID NO: 1537 - DNA, 10 bp, synthetic construct
  misc_feature 1..10: note = Description of Artificial Sequence: Synthetic oligonucleotide
  source 1..10: mol_type = other DNA
cttctccccg

SEQ ID NO: 1538 - DNA, 12 bp, synthetic construct
  misc_feature 1..12: note = Description of Artificial Sequence: Synthetic oligonucleotide
  source 1..12: mol_type = other DNA
cccttctccccg

SEQ ID NO: 1539 - DNA, 11 bp, synthetic construct
  misc_feature 1..11: note = Description of Artificial Sequence: Synthetic oligonucleotide
  source 1..11: mol_type = other DNA
gtcgccccttc

SEQ ID NO: 1540 - DNA, 19 bp, synthetic construct
  misc_feature 1..19: note = Description of Artificial Sequence: Synthetic oligonucleotide
  source 1..19: mol_type = other DNA
gtcgccccttctccccgca

SEQ ID NO: 1541 - DNA, 16 bp, synthetic construct
  misc_feature 1..16: note = Description of Artificial Sequence: Synthetic oligonucleotide
  source 1..16: mol_type = other DNA
tcgccccttctccccg

SEQ ID NO: 1542 - DNA, 12 bp, synthetic construct
  misc_feature 1..12: note = Description of Artificial Sequence: Synthetic oligonucleotide
  source 1..12: mol_type = other DNA
cgccccttctcc

SEQ ID NO: 1543 - DNA, 20 bp, synthetic construct
  misc_feature 1..20: note = Description of Artificial Sequence: Synthetic oligonucleotide
  source 1..20: mol_type = other DNA
tcgccccttctccccgcagc

SEQ ID NO: 1544 - DNA, 18 bp, synthetic construct
  misc_feature 1..18: note = Description of Artificial Sequence: Synthetic oligonucleotide
  source 1..18: mol_type = other DNA
cgccccttctccccgcag

SEQ ID NO: 1545 - DNA, 13 bp, synthetic construct
  misc_feature 1..13: note = Description of Artificial Sequence: Synthetic oligonucleotide
  source 1..13: mol_type = other DNA
cgccccttctccc

SEQ ID NO: 1546 - DNA, 14 bp, synthetic construct
  misc_feature 1..14: note = Description of Artificial Sequence: Synthetic oligonucleotide
  source 1..14: mol_type = other DNA
gccccttctccccg

SEQ ID NO: 1547 - DNA, 11 bp, synthetic construct
  misc_feature 1..11: note = Description of Artificial Sequence: Synthetic oligonucleotide
  source 1..11: mol_type = other DNA
tctccccgcag

SEQ ID NO: 1548 - DNA, 14 bp, synthetic construct
  misc_feature 1..14: note = Description of Artificial Sequence: Synthetic oligonucleotide
  source 1..14: mol_type = other DNA
cttctccccgcagc

SEQ ID NO: 1549 - DNA, 17 bp, synthetic construct
  misc_feature 1..17: note = Description of Artificial Sequence: Synthetic oligonucleotide
  source 1..17: mol_type = other DNA
cgccccttctccccgca

SEQ ID NO: 1550 - DNA, 16 bp, synthetic construct
  misc_feature 1..16: note = Description of Artificial Sequence: Synthetic oligonucleotide
  source 1..16: mol_type = other DNA
gccccttctccccgca

SEQ ID NO: 1551 - DNA, 11 bp, synthetic construct
  misc_feature 1..11: note = Description of Artificial Sequence: Synthetic oligonucleotide
  source 1..11: mol_type = other DNA
cgccccttctc

SEQ ID NO: 1552 - DNA, 14 bp, synthetic construct
  misc_feature 1..14: note = Description of Artificial Sequence: Synthetic oligonucleotide
  source 1..14: mol_type = other DNA
gtcgccccttctcc

SEQ ID NO: 1553 - DNA, 18 bp, synthetic construct
  misc_feature 1..18: note = Description of Artificial Sequence: Synthetic oligonucleotide
  source 1..18: mol_type = other DNA
gccccttctccccgcagc

SEQ ID NO: 1554 - DNA, 11 bp, synthetic construct
  misc_feature 1..11: note = Description of Artificial Sequence: Synthetic oligonucleotide
  source 1..11: mol_type = other DNA
ttctccccgca

SEQ ID NO: 1555 - DNA, 16 bp, synthetic construct
  misc_feature 1..16: note = Description of Artificial Sequence: Synthetic oligonucleotide
  source 1..16: mol_type = other DNA
cccttctccccgcagc

SEQ ID NO: 1556 - DNA, 14 bp, synthetic construct
  misc_feature 1..14: note = Description of Artificial Sequence: Synthetic oligonucleotide
  source 1..14: mol_type = other DNA
tcgccccttctccc

SEQ ID NO: 1557 - DNA, 19 bp, synthetic construct
  misc_feature 1..19: note = Description of Artificial Sequence: Synthetic oligonucleotide
  source 1..19: mol_type = other DNA
cgccccttctccccgcagc

SEQ ID NO: 1558 - DNA, 14 bp, synthetic construct
  misc_feature 1..14: note = Description of Artificial Sequence: Synthetic oligonucleotide
  source 1..14: mol_type = other DNA
ccccttctccccgc

SEQ ID NO: 1559 - DNA, 11 bp, synthetic construct
  misc_feature 1..11: note = Description of Artificial Sequence: Synthetic oligonucleotide
  source 1..11: mol_type = other DNA
cttctccccgc

SEQ ID NO: 1560 - DNA, 13 bp, synthetic construct
  misc_feature 1..13: note = Description of Artificial Sequence: Synthetic oligonucleotide
  source 1..13: mol_type = other DNA
ttctccccgcagc

SEQ ID NO: 1561 - DNA, 13 bp, synthetic construct
  misc_feature 1..13: note = Description of Artificial Sequence: Synthetic oligonucleotide
  source 1..13: mol_type = other DNA
gtcgccccttctc

SEQ ID NO: 1562 - DNA, 14 bp, synthetic construct
  misc_feature 1..14: note = Description of Artificial Sequence: Synthetic oligonucleotide
  source 1..14: mol_type = other DNA
ccttctccccgcag

SEQ ID NO: 1563 - DNA, 16 bp, synthetic construct
  misc_feature 1..16: note = Description of Artificial Sequence: Synthetic oligonucleotide
  source 1..16: mol_type = other DNA
gtcgccccttctcccc

SEQ ID NO: 1564 - DNA, 15 bp, synthetic construct
  misc_feature 1..15: note = Description of Artificial Sequence: Synthetic oligonucleotide
  source 1..15: mol_type = other DNA
gtcgccccttctccc

SEQ ID NO: 1565 - DNA, 15 bp, synthetic construct
  misc_feature 1..15: note = Description of Artificial Sequence: Synthetic oligonucleotide
  source 1..15: mol_type = other DNA
gccccttctccccgc

SEQ ID NO: 1566 - DNA, 17 bp, synthetic construct
  misc_feature 1..17: note = Description of Artificial Sequence: Synthetic oligonucleotide
  source 1..17: mol_type = other DNA
tcgccccttctccccgc

SEQ ID NO: 1567 - DNA, 20 bp, synthetic construct
  misc_feature 1..20: note = Description of Artificial Sequence: Synthetic oligonucleotide
  source 1..20: mol_type = other DNA
gtcgccccttctccccgcag

SEQ ID NO: 1568 - DNA, 13 bp, synthetic construct
  misc_feature 1..13: note = Description of Artificial Sequence: Synthetic oligonucleotide
  source 1..13: mol_type = other DNA
ccttctccccgca

SEQ ID NO: 1569 - DNA, 11 bp, synthetic construct
  misc_feature 1..11: note = Description of Artificial Sequence: Synthetic oligonucleotide
  source 1..11: mol_type = other DNA
tcgccccttct

SEQ ID NO: 1570 - DNA, 15 bp, synthetic construct
  misc_feature 1..15: note = Description of Artificial Sequence: Synthetic oligonucleotide
  source 1..15: mol_type = other DNA
cccttctccccgcag

SEQ ID NO: 1571 - DNA, 17 bp, synthetic construct
  misc_feature 1..17: note = Description of Artificial Sequence: Synthetic oligonucleotide
  source 1..17: mol_type = other DNA
gtcgccccttctccccg

SEQ ID NO: 1572 - DNA, 10 bp, synthetic construct
  misc_feature 1..10: note = Description of Artificial Sequence: Synthetic oligonucleotide
  source 1..10: mol_type = other DNA
cgccccttct

SEQ ID NO: 1573 - DNA, 14 bp, synthetic construct
  misc_feature 1..14: note = Description of Artificial Sequence: Synthetic oligonucleotide
  source 1..14: mol_type = other DNA
cgccccttctcccc

SEQ ID NO: 1574 - DNA, 17 bp, synthetic construct
  misc_feature 1..17: note = Description of Artificial Sequence: Synthetic oligonucleotide
  source 1..17: mol_type = other DNA
ccccttctccccgcagc

SEQ ID NO: 1575 - DNA, 17 bp, synthetic construct
  misc_feature 1..17: note = Description of Artificial Sequence: Synthetic oligonucleotide
  source 1..17: mol_type = other DNA
gccccttctccccgcag

SEQ ID NO: 1576 - DNA, 19 bp, synthetic construct
  misc_feature 1..19: note = Description of Artificial Sequence: Synthetic oligonucleotide
  source 1..19: mol_type = other DNA
tcgccccttctccccgcag

SEQ ID NO: 1577 - DNA, 12 bp, synthetic construct
  misc_feature 1..12: note = Description of Artificial Sequence: Synthetic oligonucleotide
  source 1..12: mol_type = other DNA
ttctccccgcag

SEQ ID NO: 1578 - DNA, 12 bp, synthetic construct
  misc_feature 1..12: note = Description of Artificial Sequence: Synthetic oligonucleotide
  source 1..12: mol_type = other DNA
cttctccccgca

SEQ ID NO: 1579 - DNA, 13 bp, synthetic construct
  misc_feature 1..13: note = Description of Artificial Sequence: Synthetic oligonucleotide
  source 1..13: mol_type = other DNA
ccccttctccccg

SEQ ID NO: 1580 - DNA, 10 bp, synthetic construct
  misc_feature 1..10: note = Description of Artificial Sequence: Synthetic oligonucleotide
  source 1..10: mol_type = other DNA
tcgccccttc

SEQ ID NO: 1581 - DNA, 12 bp, synthetic construct
  misc_feature 1..12: note = Description of Artificial Sequence: Synthetic oligonucleotide
  source 1..12: mol_type = other DNA
tctccccgcagc

SEQ ID NO: 1582 - DNA, 11 bp, synthetic construct
  misc_feature 1..11: note = Description of Artificial Sequence: Synthetic oligonucleotide
  source 1..11: mol_type = other DNA
ccttctccccg

SEQ ID NO: 1583 - DNA, 11 bp, synthetic construct
  misc_feature 1..11: note = Description of Artificial Sequence: Synthetic oligonucleotide
  source 1..11: mol_type = other DNA
ctccccgcagc

SEQ ID NO: 1584 - DNA, 14 bp, synthetic construct
  misc_feature 1..14: note = Description of Artificial Sequence: Synthetic oligonucleotide
  source 1..14: mol_type = other DNA
cccttctccccgca

SEQ ID NO: 1585 - DNA, 15 bp, synthetic construct
  misc_feature 1..15: note = Description of Artificial Sequence: Synthetic oligonucleotide
  source 1..15: mol_type = other DNA
ccccttctccccgca

SEQ ID NO: 1586 - DNA, 15 bp, synthetic construct
  misc_feature 1..15: note = Description of Artificial Sequence: Synthetic oligonucleotide
  source 1..15: mol_type = other DNA
tcgccccttctcccc

SEQ ID NO: 1587 - DNA, 16 bp, synthetic construct
  misc_feature 1..16: note = Description of Artificial Sequence: Synthetic oligonucleotide
  source 1..16: mol_type = other DNA
ccccttctccccgcag

SEQ ID NO: 1588 - DNA, 12 bp, synthetic construct
  misc_feature 1..12: note = Description of Artificial Sequence: Synthetic oligonucleotide
  source 1..12: mol_type = other DNA
ccttctccccgc

SEQ ID NO: 1589 - DNA, 18 bp, synthetic construct
  misc_feature 1..18: note = Description of Artificial Sequence: Synthetic oligonucleotide
  source 1..18: mol_type = other DNA
gtcgccccttctccccgc

SEQ ID NO: 1590 - DNA, 10 bp, synthetic construct
  misc_feature 1..10: note = Description of Artificial Sequence: Synthetic oligonucleotide
  source 1..10: mol_type = other DNA
tccccgcagc

SEQ ID NO: 1591 - DNA, 16 bp, synthetic construct
  misc_feature 1..16: note = Description of Artificial Sequence: Synthetic oligonucleotide
  source 1..16: mol_type = other DNA
cgccccttctccccgc

SEQ ID NO: 1592 - DNA, 15 bp, synthetic construct
  misc_feature 1..15: note = Description of Artificial Sequence: Synthetic oligonucleotide
  source 1..15: mol_type = other DNA
tttgtcgttttgtcg

SEQ ID NO: 1593 - DNA, 10 bp, synthetic construct
  misc_feature 1..10: note = Description of Artificial Sequence: Synthetic oligonucleotide
  source 1..10: mol_type = other DNA
ttgtcgtttt

SEQ ID NO: 1594 - DNA, 16 bp, synthetic construct
  misc_feature 1..16: note = Description of Artificial Sequence: Synthetic oligonucleotide
  source 1..16: mol_type = other DNA
gtcgttttgtcgtttt

SEQ ID NO: 1595 - DNA, 23 bp, synthetic construct
  misc_feature 1..23: note = Description of Artificial Sequence: Synthetic oligonucleotide
  source 1..23: mol_type = other DNA
tcgtcgttttgtcgttttgtcgt

SEQ ID NO: 1596 - DNA, 22 bp, synthetic construct
  misc_feature 1..22: note = Description of Artificial Sequence: Synthetic oligonucleotide
  source 1..22: mol_type = other DNA
tcgtcgttttgtcgttttgtcg

SEQ ID NO: 1597 - DNA, 19 bp, synthetic construct
  misc_feature 1..19: note = Description of Artificial Sequence: Synthetic oligonucleotide
  source 1..19: mol_type = other DNA
cgtcgttttgtcgttttgt

SEQ ID NO: 1598 - DNA, 17 bp, synthetic construct
  misc_feature 1..17: note = Description of Artificial Sequence: Synthetic oligonucleotide
  source 1..17: mol_type = other DNA
gtcgttttgtcgttttg

SEQ ID NO: 1599 - DNA, 12 bp, synthetic construct
  misc_feature 1..12: note = Description of Artificial Sequence: Synthetic oligonucleotide
  source 1..12: mol_type = other DNA
ttttgtcgtttt

SEQ ID NO: 1600 - DNA, 12 bp, synthetic construct
  misc_feature 1..12: note = Description of Artificial Sequence: Synthetic oligonucleotide
  source 1..12: mol_type = other DNA
tttgtcgttttg

SEQ ID NO: 1601 - DNA, 12 bp, synthetic construct
  misc_feature 1..12: note = Description of Artificial Sequence: Synthetic oligonucleotide
  source 1..12: mol_type = other DNA
tgtcgttttgtc

SEQ ID NO: 1602 - DNA, 15 bp, synthetic construct
  misc_feature 1..15: note = Description of Artificial Sequence: Synthetic oligonucleotide
  source 1..15: mol_type = other DNA
ttttgtcgttttgtc

SEQ ID NO: 1603 - DNA, 14 bp, synthetic construct
  misc_feature 1..14: note = Description of Artificial Sequence: Synthetic oligonucleotide
  source 1..14: mol_type = other DNA
ttgtcgttttgtcg

SEQ ID NO: 1604 - DNA, 16 bp, synthetic construct
  misc_feature 1..16: note = Description of Artificial Sequence: Synthetic oligonucleotide
  source 1..16: mol_type = other DNA
cgtcgttttgtcgttt

SEQ ID NO: 1605 - DNA, 11 bp, synthetic construct
  misc_feature 1..11: note = Description of Artificial Sequence: Synthetic oligonucleotide
  source 1..11: mol_type = other DNA
cgtcgttttgt

SEQ ID NO: 1606 - DNA, 11 bp, synthetic construct
  misc_feature 1..11: note = Description of Artificial Sequence: Synthetic oligonucleotide
  source 1..11: mol_type = other DNA
ttttgtcgttt

SEQ ID NO: 1607 - DNA, 15 bp, synthetic construct
  misc_feature 1..15: note = Description of Artificial Sequence: Synthetic oligonucleotide
  source 1..15: mol_type = other DNA
tgtcgttttgtcgtt

SEQ ID NO: 1608 - DNA, 18 bp, synthetic construct
  misc_feature 1..18: note = Description of Artificial Sequence: Synthetic oligonucleotide
  source 1..18: mol_type = other DNA
cgtcgttttgtcgttttg

SEQ ID NO: 1609 - DNA, 13 bp, synthetic construct
  misc_feature 1..13: note = Description of Artificial Sequence: Synthetic oligonucleotide
  source 1..13: mol_type = other DNA
gttttgtcgtttt

SEQ ID NO: 1610 - DNA, 14 bp, synthetic construct
  misc_feature 1..14: note = Description of Artificial Sequence: Synthetic oligonucleotide
  source 1..14: mol_type = other DNA
cgtcgttttgtcgt

SEQ ID NO: 1611 - DNA, 13 bp, synthetic construct
  misc_feature 1..13: note = Description of Artificial Sequence: Synthetic oligonucleotide
  source 1..13: mol_type = other DNA
tcgttttgtcgtt

SEQ ID NO: 1612 - DNA, 15 bp, synthetic construct
  misc_feature 1..15: note = Description of Artificial Sequence: Synthetic oligonucleotide
  source 1..15: mol_type = other DNA
cgtcgttttgtcgtt

SEQ ID NO: 1613 - DNA, 13 bp, synthetic construct
  misc_feature 1..13: note = Description of Artificial Sequence: Synthetic oligonucleotide
  source 1..13: mol_type = other DNA
cgtcgttttgtcg

SEQ ID NO: 1614 - DNA, 12 bp, synthetic construct
  misc_feature 1..12: note = Description of Artificial Sequence: Synthetic oligonucleotide
  source 1..12: mol_type = other DNA
cgtcgttttgtc

SEQ ID NO: 1615 - DNA, 18 bp, synthetic construct
  misc_feature 1..18: note = Description of Artificial Sequence: Synthetic oligonucleotide
  source 1..18: mol_type = other DNA
tcgttttgtcgttttgtc

SEQ ID NO: 1616 - DNA, 11 bp, synthetic construct
  misc_feature 1..11: note = Description of Artificial Sequence: Synthetic oligonucleotide
  source 1..11: mol_type = other DNA
tttgtcgtttt

SEQ ID NO: 1617 - DNA, 19 bp, synthetic construct
  misc_feature 1..19: note = Description of Artificial Sequence: Synthetic oligonucleotide
  source 1..19: mol_type = other DNA
tcgttttgtcgttttgtcg

SEQ ID NO: 1618 - DNA, 16 bp, synthetic construct
  misc_feature 1..16: note = Description of Artificial Sequence: Synthetic oligonucleotide
  source 1..16: mol_type = other DNA
gttttgtcgttttgtc

SEQ ID NO: 1619 - DNA, 10 bp, synthetic construct
  misc_feature 1..10: note = Description of Artificial Sequence: Synthetic oligonucleotide
  source 1..10: mol_type = other DNA
cgtcgttttg

SEQ ID NO: 1620 - DNA, 17 bp, synthetic construct
  misc_feature 1..17: note = Description of Artificial Sequence: Synthetic oligonucleotide
  source 1..17: mol_type = other DNA
cgtcgttttgtcgtttt

SEQ ID NO: 1621 - DNA, 11 bp, synthetic construct
  misc_feature 1..11: note = Description of Artificial Sequence: Synthetic oligonucleotide
  source 1..11: mol_type = other DNA
gttttgtcgtt

SEQ ID NO: 1622 - DNA, 10 bp, synthetic construct
  misc_feature 1..10: note = Description of Artificial Sequence: Synthetic oligonucleotide
  source 1..10: mol_type = other DNA
tcgttttgtc

SEQ ID NO: 1623 - DNA, 17 bp, synthetic construct
  misc_feature 1..17: note = Description of Artificial Sequence: Synthetic oligonucleotide
  source 1..17: mol_type = other DNA
ttttgtcgttttgtcgt

SEQ ID NO: 1624 - DNA, 19 bp, synthetic construct
  misc_feature 1..19: note = Description of Artificial Sequence: Synthetic oligonucleotide
  source 1..19: mol_type = other DNA
cgttttgtcgttttgtcgt

SEQ ID NO: 1625 - DNA, 18 bp, synthetic construct
  misc_feature 1..18: note = Description of Artificial Sequence: Synthetic oligonucleotide
  source 1..18: mol_type = other DNA
ttttgtcgttttgtcgtt

SEQ ID NO: 1626 - DNA, 18 bp, synthetic construct
  misc_feature 1..18: note = Description of Artificial Sequence: Synthetic oligonucleotide
  source 1..18: mol_type = other DNA
gttttgtcgttttgtcgt

SEQ ID NO: 1627 - DNA, 22 bp, synthetic construct
  misc_feature 1..22: note = Description of Artificial Sequence: Synthetic oligonucleotide
  source 1..22: mol_type = other DNA
cgtcgttttgtcgttttgtcgt

SEQ ID NO: 1628 - DNA, 18 bp, synthetic construct
  misc_feature 1..18: note = Description of Artificial Sequence: Synthetic oligonucleotide
  source 1..18: mol_type = other DNA
tcgtcgttttgtcgtttt

SEQ ID NO: 1629 - DNA, 13 bp, synthetic construct
  misc_feature 1..13: note = Description of Artificial Sequence: Synthetic oligonucleotide
  source 1..13: mol_type = other DNA
tgtcgttttgtcg

SEQ ID NO: 1630 - DNA, 20 bp, synthetic construct
  misc_feature 1..20: note = Description of Artificial Sequence: Synthetic oligonucleotide
  source 1..20: mol_type = other DNA
tcgttttgtcgttttgtcgt

SEQ ID NO: 1631 - DNA, 20 bp, synthetic construct
  misc_feature 1..20: note = Description of Artificial Sequence: Synthetic oligonucleotide
  source 1..20: mol_type = other DNA
cgttttgtcgttttgtcgtt

SEQ ID NO: 1632 - DNA, 13 bp, synthetic construct
  misc_feature 1..13: note = Description of Artificial Sequence: Synthetic oligonucleotide
  source 1..13: mol_type = other DNA
tttgtcgttttgt

SEQ ID NO: 1633 - DNA, 13 bp, synthetic construct
  misc_feature 1..13: note = Description of Artificial Sequence: Synthetic oligonucleotide
  source 1..13: mol_type = other DNA
gtcgttttgtcgt

SEQ ID NO: 1634 - DNA, 14 bp, synthetic construct
  misc_feature 1..14: note = Description of Artificial Sequence: Synthetic oligonucleotide
  source 1..14: mol_type = other DNA
cgttttgtcgtttt

SEQ ID NO: 1635 - DNA, 15 bp, synthetic construct
  misc_feature 1..15: note = Description of Artificial Sequence: Synthetic oligonucleotide
  source 1..15: mol_type = other DNA
ttgtcgttttgtcgt

SEQ ID NO: 1636 - DNA, 10 bp, synthetic construct
  misc_feature 1..10: note = Description of Artificial Sequence: Synthetic oligonucleotide
  source 1..10: mol_type = other DNA
ttttgtcgtt

SEQ ID NO: 1637 - DNA, 15 bp, synthetic construct
  misc_feature 1..15: note = Description of Artificial Sequence: Synthetic oligonucleotide
  source 1..15: mol_type = other DNA
cgttttgtcgttttg

SEQ ID NO: 1638 - DNA, 19 bp, synthetic construct
  misc_feature 1..19: note = Description of Artificial Sequence: Synthetic oligonucleotide
  source 1..19: mol_type = other DNA
gttttgtcgttttgtcgtt

SEQ ID NO: 1639 - DNA, 14 bp, synthetic construct
  misc_feature 1..14: note = Description of Artificial Sequence: Synthetic oligonucleotide
  source 1..14: mol_type = other DNA
tcgttttgtcgttt

SEQ ID NO: 1640 - DNA, 17 bp, synthetic construct
  misc_feature 1..17: note = Description of Artificial Sequence: Synthetic oligonucleotide
  source 1..17: mol_type = other DNA
tcgtcgttttgtcgttt

SEQ ID NO: 1641 - DNA, 21 bp, synthetic construct
  misc_feature 1..21: note = Description of Artificial Sequence: Synthetic oligonucleotide
  source 1..21: mol_type = other DNA
tcgttttgtcgttttgtcgtt

SEQ ID NO: 1642 - DNA, 11 bp, synthetic construct
  misc_feature 1..11: note = Description of Artificial Sequence: Synthetic oligonucleotide
  source 1..11: mol_type = other DNA
tgtcgttttgt

SEQ ID NO: 1643 - DNA, 14 bp, synthetic construct
  misc_feature 1..14: note = Description of Artificial Sequence: Synthetic oligonucleotide
  source 1..14: mol_type = other DNA
tcgtcgttttgtcg

SEQ ID NO: 1644 - DNA, 10 bp, synthetic construct
  misc_feature 1..10: note = Description of Artificial Sequence: Synthetic oligonucleotide
  source 1..10: mol_type = other DNA
tgtcgttttg

SEQ ID NO: 1645 - DNA, 17 bp, synthetic construct
  misc_feature 1..17: note = Description of Artificial Sequence: Synthetic oligonucleotide
  source 1..17: mol_type = other DNA
tcgttttgtcgttttgt

SEQ ID NO: 1646 - DNA, 10 bp, synthetic construct
  misc_feature 1..10: note = Description of Artificial Sequence: Synthetic oligonucleotide
  source 1..10: mol_type = other DNA
gttttgtcgt

SEQ ID NO: 1647 - DNA, 12 bp, synthetic construct
  misc_feature 1..12: note = Description of Artificial Sequence: Synthetic oligonucleotide
  source 1..12: mol_type = other DNA
gttttgtcgttt

SEQ ID NO: 1648 - DNA, 19 bp, synthetic construct
  misc_feature 1..19: note = Description of Artificial Sequence: Synthetic oligonucleotide
  source 1..19: mol_type = other DNA
tcgtcgttttgtcgttttg

SEQ ID NO: 1649 - DNA, 17 bp, synthetic construct
  misc_feature 1..17: note = Description of Artificial Sequence: Synthetic oligonucleotide
  source 1..17: mol_type = other DNA
cgttttgtcgttttgtc

SEQ ID NO: 1650 - DNA, 10 bp, synthetic construct
  misc_feature 1..10: note = Description of Artificial Sequence: Synthetic oligonucleotide
  source 1..10: mol_type = other DNA
cgttttgtcg

SEQ ID NO: 1651 - DNA, 12 bp, synthetic construct
  misc_feature 1..12: note = Description of Artificial Sequence: Synthetic oligonucleotide
  source 1..12: mol_type = other DNA
ttgtcgttttgt

SEQ ID NO: 1652 - DNA, 20 bp, synthetic construct
  misc_feature 1..20: note = Description of Artificial Sequence: Synthetic oligonucleotide
  source 1..20: mol_type = other DNA
gtcgttttgtcgttttgtcg

SEQ ID NO: 1653 - DNA, 16 bp, synthetic construct
  misc_feature 1..16: note = Description of Artificial Sequence: Synthetic oligonucleotide
  source 1..16: mol_type = other DNA
cgttttgtcgttttgt

SEQ ID NO: 1654 - DNA, 19 bp, synthetic construct
  misc_feature 1..19: note = Description of Artificial Sequence: Synthetic oligonucleotide
  source 1..19: mol_type = other DNA
gtcgttttgtcgttttgtc

SEQ ID NO: 1655 - DNA, 21 bp, synthetic construct
  misc_feature 1..21: note = Description of Artificial Sequence: Synthetic oligonucleotide
  source 1..21: mol_type = other DNA
gtcgttttgtcgttttgtcgt

SEQ ID NO: 1656 - DNA, 12 bp, synthetic construct
  misc_feature 1..12: note = Description of Artificial Sequence: Synthetic oligonucleotide
  source 1..12: mol_type = other DNA
tcgtcgttttgt

SEQ ID NO: 1657 - DNA, 14 bp, synthetic construct
  misc_feature 1..14: note = Description of Artificial Sequence: Synthetic oligonucleotide
  source 1..14: mol_type = other DNA
gtcgttttgtcgtt

SEQ ID NO: 1658 - DNA, 14 bp, synthetic construct
  misc_feature 1..14: note = Description of Artificial Sequence: Synthetic oligonucleotide
  source 1..14: mol_type = other DNA
gttttgtcgttttg

SEQ ID NO: 1659 - DNA, 21 bp, synthetic construct
  misc_feature 1..21: note = Description of Artificial Sequence: Synthetic oligonucleotide
  source 1..21: mol_type = other DNA
cgtcgttttgtcgttttgtcg

SEQ ID NO: 1660 - DNA, 16 bp, synthetic construct
  misc_feature 1..16: note = Description of Artificial Sequence: Synthetic oligonucleotide
  source 1..16: mol_type = other DNA
tcgtcgttttgtcgtt

SEQ ID NO: 1661 - DNA, 14 bp, synthetic construct
  misc_feature 1..14: note = Description of Artificial Sequence: Synthetic oligonucleotide
  source 1..14: mol_type = other DNA
ttttgtcgttttgt

SEQ ID NO: 1662 - DNA, 14 bp, synthetic construct
  misc_feature 1..14: note = Description of Artificial Sequence: Synthetic oligonucleotide
  source 1..14: mol_type = other DNA
tgtcgttttgtcgt

SEQ ID NO: 1663 - DNA, 15 bp, synthetic construct
  misc_feature 1..15: note = Description of Artificial Sequence: Synthetic oligonucleotide
  source 1..15: mol_type = other DNA
tcgttttgtcgtttt

SEQ ID NO: 1664 - DNA, 11 bp, synthetic construct
  misc_feature 1..11: note = Description of Artificial Sequence: Synthetic oligonucleotide
  source 1..11: mol_type = other DNA
tcgttttgtcg

SEQ ID NO: 1665 - DNA, 11 bp, synthetic construct
  misc_feature 1..11: note = Description of Artificial Sequence: Synthetic oligonucleotide
  source 1..11: mol_type = other DNA
tcgtcgttttg

SEQ ID NO: 1666 - DNA, 17 bp, synthetic construct
  misc_feature 1..17: note = Description of Artificial Sequence: Synthetic oligonucleotide
  source 1..17: mol_type = other DNA
tttgtcgttttgtcgtt

SEQ ID NO: 1667 - DNA, 17 bp, synthetic construct
  misc_feature 1..17: note = Description of Artificial Sequence: Synthetic oligonucleotide
  source 1..17: mol_type = other DNA
gttttgtcgttttgtcg

SEQ ID NO: 1668 - DNA, 12 bp, synthetic construct
  misc_feature 1..12: note = Description of Artificial Sequence: Synthetic oligonucleotide
  source 1..12: mol_type = other DNA
gtcgttttgtcg

SEQ ID NO: 1669 - DNA, 16 bp, synthetic construct
  misc_feature 1..16: note = Description of Artificial Sequence: Synthetic oligonucleotide
  source 1..16: mol_type = other DNA
ttttgtcgttttgtcg

SEQ ID NO: 1670 - DNA, 11 bp, synthetic construct
  misc_feature 1..11: note = Description of Artificial Sequence: Synthetic oligonucleotide
  source 1..11: mol_type = other DNA
gtcgttttgtc

SEQ ID NO: 1671 - DNA, 13 bp, synthetic construct
  misc_feature 1..13: note = Description of Artificial Sequence: Synthetic oligonucleotide
  source 1..13: mol_type = other DNA
ttttgtcgttttg

SEQ ID NO: 1672 - DNA, 13 bp, synthetic construct
  misc_feature 1..13: note = Description of Artificial Sequence: Synthetic oligonucleotide
  source 1..13: mol_type = other DNA
cgttttgtcgttt

SEQ ID NO: 1673 - DNA, 18 bp, synthetic construct
  misc_feature 1..18: note = Description of Artificial Sequence: Synthetic oligonucleotide
  source 1..18: mol_type = other DNA
cgttttgtcgttttgtcg

SEQ ID NO: 1674 - DNA, 13 bp, synthetic construct
  misc_feature 1..13: note = Description of Artificial Sequence: Synthetic oligonucleotide
  source 1..13: mol_type = other DNA
tcgtcgttttgtc

SEQ ID NO: 1675 - DNA, 21 bp, synthetic construct
  misc_feature 1..21: note = Description of Artificial Sequence: Synthetic oligonucleotide
  source 1..21: mol_type = other DNA
tcgtcgttttgtcgttttgtc

SEQ ID NO: 1676 - DNA, 11 bp, synthetic construct
  misc_feature 1..11: note = Description of Artificial Sequence: Synthetic oligonucleotide
  source 1..11: mol_type = other DNA
ttgtcgttttg

SEQ ID NO: 1677 - DNA, 16 bp, synthetic construct
  misc_feature 1..16: note = Description of Artificial Sequence: Synthetic oligonucleotide
  source 1..16: mol_type = other DNA
tttgtcgttttgtcgt

SEQ ID NO: 1678 - DNA, 18 bp, synthetic construct
  misc_feature 1..18: note = Description of Artificial Sequence: Synthetic oligonucleotide
  source 1..18: mol_type = other DNA
gtcgttttgtcgttttgt

SEQ ID NO: 1679 - DNA, 10 bp, synthetic construct
  misc_feature 1..10: note = Description of Artificial Sequence: Synthetic oligonucleotide
  source 1..10: mol_type = other DNA
tttgtcgttt

SEQ ID NO: 1680 - DNA, 13 bp, synthetic construct
  misc_feature 1..13: note = Description of Artificial Sequence: Synthetic oligonucleotide
  source 1..13: mol_type = other DNA
ttgtcgttttgtc

SEQ ID NO: 1681 - DNA, 20 bp, synthetic construct
  misc_feature 1..20: note = Description of Artificial Sequence: Synthetic oligonucleotide
  source 1..20: mol_type = other DNA
cgtcgttttgtcgttttgtc

SEQ ID NO: 1682 - DNA, 20 bp, synthetic construct
  misc_feature 1..20: note = Description of Artificial Sequence: Synthetic oligonucleotide
  source 1..20: mol_type = other DNA
tcgtcgttttgtcgttttgt

SEQ ID NO: 1683 - DNA, 10 bp, synthetic construct
  misc_feature 1..10: note = Description of Artificial Sequence: Synthetic oligonucleotide
  source 1..10: mol_type = other DNA
gtcgttttgt

SEQ ID NO: 1684 - DNA, 15 bp, synthetic construct
  misc_feature 1..15: note = Description of Artificial Sequence: Synthetic oligonucleotide
  source 1..15: mol_type = other DNA
gtcgttttgtcgttt

SEQ ID NO: 1685 - DNA, 16 bp, synthetic construct
  misc_feature 1..16: note = Description of Artificial Sequence: Synthetic oligonucleotide
  source 1..16: mol_type = other DNA
tcgttttgtcgttttg

SEQ ID NO: 1686 - DNA, 12 bp, synthetic construct
  misc_feature 1..12: note = Description of Artificial Sequence: Synthetic oligonucleotide
  source 1..12: mol_type = other DNA
cgttttgtcgtt

SEQ ID NO: 1687 - DNA, 10 bp, synthetic construct
  misc_feature 1..10: note = Description of Artificial Sequence: Synthetic oligonucleotide
  source 1..10: mol_type = other DNA
tcgtcgtttt

SEQ ID NO: 1688 - DNA, 23 bp, synthetic construct
  misc_feature 1..23: note = Description of Artificial Sequence: Synthetic oligonucleotide
  source 1..23: mol_type = other DNA
cgtcgttttgtcgttttgtcgtt

SEQ ID NO: 1689 - DNA, 12 bp, synthetic construct
  misc_feature 1..12: note = Description of Artificial Sequence: Synthetic oligonucleotide
  source 1..12: mol_type = other DNA
tcgttttgtcgt

SEQ ID NO: 1690 - DNA, 11 bp, synthetic construct
  misc_feature 1..11: note = Description of Artificial Sequence: Synthetic oligonucleotide
  source 1..11: mol_type = other DNA
cgttttgtcgt

SEQ ID NO: 1691 - DNA, 14 bp, synthetic construct
  misc_feature 1..14: note = Description of Artificial Sequence: Synthetic oligonucleotide
  source 1..14: mol_type = other DNA
tttgtcgttttgtc

SEQ ID NO: 1692 - DNA, 15 bp, synthetic construct
  misc_feature 1..15: note = Description of Artificial Sequence: Synthetic oligonucleotide
  source 1..15: mol_type = other DNA
tcgtcgttttgtcgt

SEQ ID NO: 1693 - DNA, 15 bp, synthetic construct
  misc_feature 1..15: note = Description of Artificial Sequence: Synthetic oligonucleotide
  source 1..15: mol_type = other DNA
gttttgtcgttttgt

SEQ ID NO: 1694 - DNA, 22 bp, synthetic construct
  misc_feature 1..22: note = Description of Artificial Sequence: Synthetic oligonucleotide
  source 1..22: mol_type = other DNA
gtcgttttgtcgttttgtcgtt

SEQ ID NO: 1695 - DNA, 16 bp, synthetic construct
  misc_feature 1..16: note = Description of Artificial Sequence: Synthetic oligonucleotide
  source 1..16: mol_type = other DNA
ttgtcgttttgtcgtt

SEQ ID NO: 1696 - DNA, 20 bp, synthetic construct
  misc_feature 1..20: note = Description of Artificial Sequence: Synthetic oligonucleotide
  source 1..20: mol_type = other DNA
ccgtcgcccttcagcacgca

SEQ ID NO: 1697 - DNA, 12 bp, synthetic construct
  misc_feature 1..12: note = Description of Artificial Sequence: Synthetic oligonucleotide
  source 1..12: mol_type = other DNA
cgcccttcagca

SEQ ID NO: 1698 - DNA, 15 bp, synthetic construct
  misc_feature 1..15: note = Description of Artificial Sequence: Synthetic oligonucleotide
  source 1..15: mol_type = other DNA
tcgcccttcagcacg

SEQ ID NO: 1699 - DNA, 16 bp, synthetic construct
  misc_feature 1..16: note = Description of Artificial Sequence: Synthetic oligonucleotide
  source 1..16: mol_type = other DNA
tcgcccttcagcacgc

SEQ ID NO: 1700 - DNA, 10 bp, synthetic construct
  misc_feature 1..10: note = Description of Artificial Sequence: Synthetic oligonucleotide
  source 1..10: mol_type = other DNA
gtcgcccttc

SEQ ID NO: 1701 - DNA, 13 bp, synthetic construct
  misc_feature 1..13: note = Description of Artificial Sequence: Synthetic oligonucleotide
  source 1..13: mol_type = other DNA
ccgtcgcccttca

SEQ ID NO: 1702 - DNA, 13 bp, synthetic construct
  misc_feature 1..13: note = Description of Artificial Sequence: Synthetic oligonucleotide
  source 1..13: mol_type = other DNA
cgtcgcccttcag

SEQ ID NO: 1703 - DNA, 17 bp, synthetic construct
  misc_feature 1..17: note = Description of Artificial Sequence: Synthetic oligonucleotide
  source 1..17: mol_type = other DNA
gtcgcccttcagcacgc

SEQ ID NO: 1704 - DNA, 14 bp, synthetic construct
  misc_feature 1..14: note = Description of Artificial Sequence: Synthetic oligonucleotide
  source 1..14: mol_type = other DNA
tcgcccttcagcac

SEQ ID NO: 1705 - DNA, 11 bp, synthetic construct
  misc_feature 1..11: note = Description of Artificial Sequence: Synthetic oligonucleotide
  source 1..11: mol_type = other DNA
cttcagcacgc

SEQ ID NO: 1706 - DNA, 18 bp, synthetic construct
  misc_feature 1..18: note = Description of Artificial Sequence: Synthetic oligonucleotide
  source 1..18: mol_type = other DNA
cgtcgcccttcagcacgc

SEQ ID NO: 1707 - DNA, 19 bp, synthetic construct
  misc_feature 1..19: note = Description of Artificial Sequence: Synthetic oligonucleotide
  source 1..19: mol_type = other DNA
cgtcgcccttcagcacgca

SEQ ID NO: 1708 - DNA, 10 bp, synthetic construct
  misc_feature 1..10: note = Description of Artificial Sequence: Synthetic oligonucleotide
  source 1..10: mol_type = other DNA
tcagcacgca

SEQ ID NO: 1709 - DNA, 15 bp, synthetic construct
  misc_feature 1..15: note = Description of Artificial Sequence: Synthetic oligonucleotide
  source 1..15: mol_type = other DNA
cgcccttcagcacgc

SEQ ID NO: 1710 - DNA, 13 bp, synthetic construct
  misc_feature 1..13: note = Description of Artificial Sequence: Synthetic oligonucleotide
  source 1..13: mol_type = other DNA
gcccttcagcacg

SEQ ID NO: 1711 - DNA, 14 bp, synthetic construct
  misc_feature 1..14: note = Description of Artificial Sequence: Synthetic oligonucleotide
  source 1..14: mol_type = other DNA
cccttcagcacgca

SEQ ID NO: 1712 - DNA, 12 bp, synthetic construct
  misc_feature 1..12: note = Description of Artificial Sequence: Synthetic oligonucleotide
  source 1..12: mol_type = other DNA
cccttcagcacg

SEQ ID NO: 1713 - DNA, 17 bp, synthetic construct
  misc_feature 1..17: note = Description of Artificial Sequence: Synthetic oligonucleotide
  source 1..17: mol_type = other DNA
cgtcgcccttcagcacg

SEQ ID NO: 1714 - DNA, 14 bp, synthetic construct
  misc_feature 1..14: note = Description of Artificial Sequence: Synthetic oligonucleotide
  source 1..14: mol_type = other DNA
gtcgcccttcagca

SEQ ID NO: 1715 - DNA, 10 bp, synthetic construct
  misc_feature 1..10: note = Description of Artificial Sequence: Synthetic oligonucleotide
  source 1..10: mol_type = other DNA
tcgcccttca

SEQ ID NO: 1716 - DNA, 12 bp, synthetic construct
  misc_feature 1..12: note = Description of Artificial Sequence: Synthetic oligonucleotide
  source 1..12: mol_type = other DNA
ccttcagcacgc

SEQ ID NO: 1717 - DNA, 16 bp, synthetic construct
  misc_feature 1..16: note = Description of Artificial Sequence: Synthetic oligonucleotide
  source 1..16: mol_type = other DNA
ccgtcgcccttcagca

SEQ ID NO: 1718 - DNA, 13 bp, synthetic construct
  misc_feature 1..13: note = Description of Artificial Sequence: Synthetic oligonucleotide
  source 1..13: mol_type = other DNA
gtcgcccttcagc

SEQ ID NO: 1719 - DNA, 18 bp, synthetic construct
  misc_feature 1..18: note = Description of Artificial Sequence: Synthetic oligonucleotide
  source 1..18: mol_type = other DNA
ccgtcgcccttcagcacg

SEQ ID NO: 1720 - DNA, 11 bp, synthetic construct
  misc_feature 1..11: note = Description of Artificial Sequence: Synthetic oligonucleotide
  source 1..11: mol_type = other DNA
ccgtcgccctt

SEQ ID NO: 1721 - DNA, 14 bp, synthetic construct
  misc_feature 1..14: note = Description of Artificial Sequence: Synthetic oligonucleotide
  source 1..14: mol_type = other DNA
ccgtcgcccttcag

SEQ ID NO: 1722 - DNA, 10 bp, synthetic construct
  misc_feature 1..10: note = Description of Artificial Sequence: Synthetic oligonucleotide
  source 1..10: mol_type = other DNA
cttcagcacg

SEQ ID NO: 1723 - DNA, 17 bp, synthetic construct
  misc_feature 1..17: note = Description of Artificial Sequence: Synthetic oligonucleotide
  source 1..17: mol_type = other DNA
tcgcccttcagcacgca

SEQ ID NO: 1724 - DNA, 12 bp, synthetic construct
  misc_feature 1..12: note = Description of Artificial Sequence: Synthetic oligonucleotide
  source 1..12: mol_type = other DNA
gtcgcccttcag

SEQ ID NO: 1725 - DNA, 16 bp, synthetic construct
  misc_feature 1..16: note = Description of Artificial Sequence: Synthetic oligonucleotide
  source 1..16: mol_type = other DNA
cgtcgcccttcagcac

SEQ ID NO: 1726 - DNA, 12 bp, synthetic construct
  misc_feature 1..12: note = Description of Artificial Sequence: Synthetic oligonucleotide
  source 1..12: mol_type = other DNA
tcgcccttcagc

SEQ ID NO: 1727 - DNA, 11 bp, synthetic construct
  misc_feature 1..11: note = Description of Artificial Sequence: Synthetic oligonucleotide
  source 1..11: mol_type = other DNA
gtcgcccttca

SEQ ID NO: 1728 - DNA, 14 bp, synthetic construct
  misc_feature 1..14: note = Description of Artificial Sequence: Synthetic oligonucleotide
  source 1..14: mol_type = other DNA
cgcccttcagcacg

SEQ ID NO: 1729 - DNA, 16 bp, synthetic construct
  misc_feature 1..16: note = Description of Artificial Sequence: Synthetic oligonucleotide
  source 1..16: mol_type = other DNA
gtcgcccttcagcacg

SEQ ID NO: 1730 - DNA, 19 bp, synthetic construct
  misc_feature 1..19: note = Description of Artificial Sequence: Synthetic oligonucleotide
  source 1..19: mol_type = other DNA
ccgtcgcccttcagcacgc

SEQ ID NO: 1731 - DNA, 14 bp, synthetic construct
  misc_feature 1..14: note = Description of Artificial Sequence: Synthetic oligonucleotide
  source 1..14: mol_type = other DNA
cgtcgcccttcagc

SEQ ID NO: 1732 - DNA, 10 bp, synthetic construct
  misc_feature 1..10: note = Description of Artificial Sequence: Synthetic oligonucleotide
  source 1..10: mol_type = other DNA
ccgtcgccct

SEQ ID NO: 1733 - DNA, 18 bp, synthetic construct
  misc_feature 1..18: note = Description of Artificial Sequence: Synthetic oligonucleotide
  source 1..18: mol_type = other DNA
gtcgcccttcagcacgca

SEQ ID NO: 1734 - DNA, 15 bp, synthetic construct
  misc_feature 1..15: note = Description of Artificial Sequence: Synthetic oligonucleotide
  source 1..15: mol_type = other DNA
gcccttcagcacgca

SEQ ID NO: 1735 - DNA, 12 bp, synthetic construct
  misc_feature 1..12: note = Description of Artificial Sequence: Synthetic oligonucleotide
  source 1..12: mol_type = other DNA
cttcagcacgca

SEQ ID NO: 1736 - DNA, 15 bp, synthetic construct
  misc_feature 1..15: note = Description of Artificial Sequence: Synthetic oligonucleotide
  source 1..15: mol_type = other DNA
gtcgcccttcagcac

SEQ ID NO: 1737 - DNA, 12 bp, synthetic construct
  misc_feature 1..12: note = Description of Artificial Sequence: Synthetic oligonucleotide
  source 1..12: mol_type = other DNA
ccgtcgcccttc

SEQ ID NO: 1738 - DNA, 11 bp, synthetic construct
  misc_feature 1..11: note = Description of Artificial Sequence: Synthetic oligonucleotide
  source 1..11: mol_type = other DNA
ccttcagcacg

SEQ ID NO: 1739 - DNA, 15 bp, synthetic construct
  misc_feature 1..15: note = Description of Artificial Sequence: Synthetic oligonucleotide
  source 1..15: mol_type = other DNA
cgtcgcccttcagca

SEQ ID NO: 1740 - DNA, 13 bp, synthetic construct
  misc_feature 1..13: note = Description of Artificial Sequence: Synthetic oligonucleotide
  source 1..13: mol_type = other DNA
cgcccttcagcac

SEQ ID NO: 1741 - DNA, 13 bp, synthetic construct
  misc_feature 1..13: note = Description of Artificial Sequence: Synthetic oligonucleotide
  source 1..13: mol_type = other DNA
cccttcagcacgc

SEQ ID NO: 1742 - DNA, 12 bp, synthetic construct
  misc_feature 1..12: note = Description of Artificial Sequence: Synthetic oligonucleotide
  source 1..12: mol_type = other DNA
cgtcgcccttca

SEQ ID NO: 1743 - DNA, 11 bp, synthetic construct
  misc_feature 1..11: note = Description of Artificial Sequence: Synthetic oligonucleotide
  source 1..11: mol_type = other DNA
ttcagcacgca

SEQ ID NO: 1744 - DNA, 14 bp, synthetic construct
  misc_feature 1..14: note = Description of Artificial Sequence: Synthetic oligonucleotide
  source 1..14: mol_type = other DNA
gcccttcagcacgc

SEQ ID NO: 1745 - DNA, 11 bp, synthetic construct
  misc_feature 1..11: note = Description of Artificial Sequence: Synthetic oligonucleotide
  source 1..11: mol_type = other DNA
cgcccttcagc

SEQ ID NO: 1746 - DNA, 15 bp, synthetic construct
  misc_feature 1..15: note = Description of Artificial Sequence: Synthetic oligonucleotide
  source 1..15: mol_type = other DNA
ccgtcgcccttcagc

SEQ ID NO: 1747 - DNA, 13 bp, synthetic construct
  misc_feature 1..13: note = Description of Artificial Sequence: Synthetic oligonucleotide
  source 1..13: mol_type = other DNA
ccttcagcacgca

SEQ ID NO: 1748 - DNA, 10 bp, synthetic construct
  misc_feature 1..10: note = Description of Artificial Sequence: Synthetic oligonucleotide
  source 1..10: mol_type = other DNA
cgcccttcag

SEQ ID NO: 1749 - DNA, 17 bp, synthetic construct
  misc_feature 1..17: note = Description of Artificial Sequence: Synthetic oligonucleotide
  source 1..17: mol_type = other DNA
ccgtcgcccttcagcac

SEQ ID NO: 1750 - DNA, 10 bp, synthetic construct
  misc_feature 1..10: note = Description of Artificial Sequence: Synthetic oligonucleotide
  source 1..10: mol_type = other DNA
cgtcgccctt

SEQ ID NO: 1751 - DNA, 16 bp, synthetic construct
  misc_feature 1..16: note = Description of Artificial Sequence: Synthetic oligonucleotide
  source 1..16: mol_type = other DNA
cgcccttcagcacgca

SEQ ID NO: 1752 - DNA, 13 bp, synthetic construct
  misc_feature 1..13: note = Description of Artificial Sequence: Synthetic oligonucleotide
  source 1..13: mol_type = other DNA
tcgcccttcagca

SEQ ID NO: 1753 - DNA, 10 bp, synthetic construct
  misc_feature 1..10: note = Description of Artificial Sequence: Synthetic oligonucleotide
  source 1..10: mol_type = other DNA
ttcagcacgc

SEQ ID NO: 1754 - DNA, 11 bp, synthetic construct
  misc_feature 1..11: note = Description of Artificial Sequence: Synthetic oligonucleotide
  source 1..11: mol_type = other DNA
cgtcgcccttc

SEQ ID NO: 1755 - DNA, 11 bp, synthetic construct
  misc_feature 1..11: note = Description of Artificial Sequence: Synthetic oligonucleotide
  source 1..11: mol_type = other DNA
tcgcccttcag

SEQ ID NO: 1756 - DNA, 21 bp, synthetic construct
  misc_feature 1..21: note = Description of Artificial Sequence: Synthetic oligonucleotide
  source 1..21: mol_type = other DNA
gtcgccccttctccccgcagc

SEQ ID NO: 1757 - DNA, 21 bp, synthetic construct
  misc_feature 1..21: note = Description of Artificial Sequence: Synthetic oligonucleotide
  source 1..21: mol_type = other DNA
gtcgccccttctccccgcagc

SEQ ID NO: 1758 - DNA, 21 bp, synthetic construct
  misc_feature 1..21: note = Description of Artificial Sequence: Synthetic oligonucleotide
  source 1..21: mol_type = other DNA
gtcgccccttctccccgcagc

SEQ ID NO: 1759 - DNA, 21 bp, synthetic construct
  misc_feature 1..21: note = Description of Artificial Sequence: Synthetic oligonucleotide
  source 1..21: mol_type = other DNA
gtcgccccttctccccgcagc

SEQ ID NO: 1760 - DNA, 21 bp, synthetic construct
  misc_feature 1..21: note = Description of Artificial Sequence: Synthetic oligonucleotide
  source 1..21: mol_type = other DNA
gtcgccccttctccccgcagc

SEQ ID NO: 1761 - DNA, 21 bp, synthetic construct
  misc_feature 1..21: note = Description of Artificial Sequence: Synthetic oligonucleotide
  source 1..21: mol_type = other DNA
gtcgccccttctccccgcagc

SEQ ID NO: 1762 - DNA, 21 bp, synthetic construct
  misc_feature 1..21: note = Description of Artificial Sequence: Synthetic oligonucleotide
  source 1..21: mol_type = other DNA
gtcgccccttctccccgcagc

SEQ ID NO: 1763 - DNA, 21 bp, synthetic construct
  misc_feature 1..21: note = Description of Artificial Sequence: Synthetic oligonucleotide
  source 1..21: mol_type = other DNA
gtcgccccttctccccgcagc

SEQ ID NO: 1764 - DNA, 21 bp, synthetic construct
  misc_feature 1..21: note = Description of Artificial Sequence: Synthetic oligonucleotide
  source 1..21: mol_type = other DNA
gtcgccccttctccccgcagc

SEQ ID NO: 1765 - DNA, 21 bp, synthetic construct
  misc_feature 1..21: note = Description of Artificial Sequence: Synthetic oligonucleotide
  source 1..21: mol_type = other DNA
gtcgccccttctccccgcagc

SEQ ID NO: 1766 - DNA, 21 bp, synthetic construct
  misc_feature 1..21: note = Description of Artificial Sequence: Synthetic oligonucleotide
  source 1..21: mol_type = other DNA
gtcgccccttctccccgcagc

SEQ ID NO: 1767 - DNA, 21 bp, synthetic construct
  misc_feature 1..21: note = Description of Artificial Sequence: Synthetic oligonucleotide
  source 1..21: mol_type = other DNA
gtcgccccttctccccgcagc

SEQ ID NO: 1768 - DNA, 21 bp, synthetic construct
  misc_feature 1..21: note = Description of Artificial Sequence: Synthetic oligonucleotide
  source 1..21: mol_type = other DNA
gtcgccccttctccccgcagc

SEQ ID NO: 1769 - DNA, 21 bp, synthetic construct
  misc_feature 1..21: note = Description of Artificial Sequence: Synthetic oligonucleotide
  source 1..21: mol_type = other DNA
gtcgccccttctccccgcagc

SEQ ID NO: 1770 - DNA, 21 bp, synthetic construct
  misc_feature 1..21: note = Description of Artificial Sequence: Synthetic oligonucleotide
  source 1..21: mol_type = other DNA
gtcgccccttctccccgcagc

SEQ ID NO: 1771 - DNA, 21 bp, synthetic construct
  misc_feature 1..21: note = Description of Artificial Sequence: Synthetic oligonucleotide
  source 1..21: mol_type = other DNA
gtcgccccttctccccgcagc

SEQ ID NO: 1772 - DNA, 21 bp, synthetic construct
  misc_feature 1..21: note = Description of Artificial Sequence: Synthetic oligonucleotide
  source 1..21: mol_type = other DNA
gtcgccccttctccccgcagc

SEQ ID NO: 1773 - DNA, 21 bp, synthetic construct
  misc_feature 1..21: note = Synthetic oligonucleotide
  modified_base 2: mod_base = OTHER; note = uracil
  source 1..21: mol_type = other DNA
gtcgccccttctccccgcagc

SEQ ID NO: 1774 - DNA, 21 bp, synthetic construct
  misc_feature 1..21: note = Synthetic oligonucleotide
  modified_base 2: mod_base = OTHER; note = uracil
  source 1..21: mol_type = other DNA
gtcgccccttctccccgcagc

SEQ ID NO: 1775 - DNA, 21 bp, synthetic construct
  misc_feature 1..21: note = Description of Artificial Sequence: Synthetic oligonucleotide
  source 1..21: mol_type = other DNA
gtcgccccttctccccgcagc

SEQ ID NO: 1776 - DNA, 21 bp, synthetic construct
  misc_feature 1..21: note = Description of Artificial Sequence: Synthetic oligonucleotide
  source 1..21: mol_type = other DNA
gtcgccccttctccccgcagc

SEQ ID NO: 1777 - DNA, 21 bp, synthetic construct
  misc_feature 1..21: note = Description of Artificial Sequence: Synthetic oligonucleotide
  source 1..21: mol_type = other DNA
gtcgccccttctccccgcagc

SEQ ID NO: 1778 - DNA, 21 bp, synthetic construct
  misc_feature 1..21: note = Description of Artificial Sequence: Synthetic oligonucleotide
  source 1..21: mol_type = other DNA
gtcgccccttctccccgcagc

SEQ ID NO: 1779 - DNA, 21 bp, synthetic construct
  misc_feature 1..21: note = Description of Artificial Sequence: Synthetic oligonucleotide
  source 1..21: mol_type = other DNA
gtcgccccttctccccgcagc

SEQ ID NO: 1780 - DNA, 21 bp, synthetic construct
  misc_feature 1..21: note = Description of Artificial Sequence: Synthetic oligonucleotide
  source 1..21: mol_type = other DNA
gtcgccccttctccccgcagc

SEQ ID NO: 1781 - DNA, 24 bp, synthetic construct
  misc_feature 1..24: note = Description of Artificial Sequence: Synthetic oligonucleotide
  source 1..24: mol_type = other DNA
tcgtcgttttgtcgttttgtcgtt

SEQ ID NO: 1782 - DNA, 24 bp, synthetic construct
  misc_feature 1..24: note = Description of Artificial Sequence: Synthetic oligonucleotide
  source 1..24: mol_type = other DNA
tcgtcgttttgtcgttttgtcgtt

SEQ ID NO: 1783 - DNA, 24 bp, synthetic construct
  misc_feature 1..24: note = Description of Artificial Sequence: Synthetic oligonucleotide
  source 1..24: mol_type = other DNA
tcgtcgttttgtcgttttgtcgtt

SEQ ID NO: 1784 - DNA, 24 bp, synthetic construct
  misc_feature 1..24: note = Description of Artificial Sequence: Synthetic oligonucleotide
  source 1..24: mol_type = other DNA
tcgtcgttttgtcgttttgtcgtt

SEQ ID NO: 1785 - DNA, 24 bp, synthetic construct
  misc_feature 1..24: note = Description of Artificial Sequence: Synthetic oligonucleotide
  source 1..24: mol_type = other DNA
tcgtcgttttgtcgttttgtcgtt

SEQ ID NO: 1786 - DNA, 24 bp, synthetic construct
  misc_feature 1..24: note = Description of Artificial Sequence: Synthetic oligonucleotide
  source 1..24: mol_type = other DNA
tcgtcgttttgtcgttttgtcgtt

SEQ ID NO: 1787 - DNA, 24 bp, synthetic construct
  misc_feature 1..24: note = Description of Artificial Sequence: Synthetic oligonucleotide
  source 1..24: mol_type = other DNA
tcgtcgttttgtcgttttgtcgtt

SEQ ID NO: 1788 - DNA, 24 bp, synthetic construct
  misc_feature 1..24: note = Description of Artificial Sequence: Synthetic oligonucleotide
  source 1..24: mol_type = other DNA
tcgtcgttttgtcgttttgtcgtt

SEQ ID NO: 1789 - DNA, 13 bp, synthetic construct
  misc_feature 1..13: note = Description of Artificial Sequence: Synthetic oligonucleotide
  source 1..13: mol_type = other DNA
tttgtcgttttgt

SEQ ID NO: 1790 - DNA, 13 bp, synthetic construct
  misc_feature 1..13: note = Description of Artificial Sequence: Synthetic oligonucleotide
  source 1..13: mol_type = other DNA
tttgtcgttttgt

SEQ ID NO: 1791 - DNA, 13 bp, synthetic construct
  misc_feature 1..13: note = Description of Artificial Sequence: Synthetic oligonucleotide
  source 1..13: mol_type = other DNA
tttgtcgttttgt

SEQ ID NO: 1792 - DNA, 13 bp, synthetic construct
  misc_feature 1..13: note = Description of Artificial Sequence: Synthetic oligonucleotide
  source 1..13: mol_type = other DNA
tttgtcgttttgt

SEQ ID NO: 1793 - DNA, 13 bp, synthetic construct
  misc_feature 1..13: note = Description of Artificial Sequence: Synthetic oligonucleotide
  source 1..13: mol_type = other DNA
tttgtcgttttgt

SEQ ID NO: 1794 - DNA, 13 bp, synthetic construct
  misc_feature 1..13: note = Description of Artificial Sequence: Synthetic oligonucleotide
  source 1..13: mol_type = other DNA
tttgtcgttttgt

SEQ ID NO: 1795 - DNA, 13 bp, synthetic construct
  misc_feature 1..13: note = Description of Artificial Sequence: Synthetic oligonucleotide
  source 1..13: mol_type = other DNA
tttgtcgttttgt

SEQ ID NO: 1796 - DNA, 20 bp, synthetic construct
  misc_feature 1..20: note = Description of Artificial Sequence: Synthetic oligonucleotide
  source 1..20: mol_type = other DNA
ccgtcgcccttcagcacgca

SEQ ID NO: 1797 - DNA, 20 bp, synthetic construct
  misc_feature 1..20: note = Description of Artificial Sequence: Synthetic oligonucleotide
  source 1..20: mol_type = other DNA
ccgtcgcccttcagcacgca

SEQ ID NO: 1798 - DNA, 20 bp, synthetic construct
  misc_feature 1..20: note = Description of Artificial Sequence: Synthetic oligonucleotide
  source 1..20: mol_type = other DNA
ccgtcgcccttcagcacgca

SEQ ID NO: 1799 - DNA, 20 bp, synthetic construct
  misc_feature 1..20: note = Description of Artificial Sequence: Synthetic oligonucleotide
  source 1..20: mol_type = other DNA
ccgtcgcccttcagcacgca

SEQ ID NO: 1800 - DNA, 20 bp, synthetic construct
  misc_feature 1..20: note = Description of Artificial Sequence: Synthetic oligonucleotide
  source 1..20: mol_type = other DNA
ccgtcgcccttcagcacgca

SEQ ID NO: 1801 - DNA, 20 bp, synthetic construct
  misc_feature 1..20: note = Description of Artificial Sequence: Synthetic oligonucleotide
  source 1..20: mol_type = other DNA
ccgtcgcccttcagcacgca

SEQ ID NO: 1802 - DNA, 20 bp, synthetic construct
  misc_feature 1..20: note = Description of Artificial Sequence: Synthetic oligonucleotide
  source 1..20: mol_type = other DNA
ccgtcgcccttcagcacgca

SEQ ID NO: 1803 - DNA, 20 bp, synthetic construct
  misc_feature 1..20: note = Description of Artificial Sequence: Synthetic oligonucleotide
  source 1..20: mol_type = other DNA
ccgtcgcccttcagcacgca

SEQ ID NO: 1804 - DNA, 20 bp, synthetic construct
  misc_feature 1..20: note = Description of Artificial Sequence: Synthetic oligonucleotide
  source 1..20: mol_type = other DNA
ccgtcgcccttcagcacgca

SEQ ID NO: 1805 - DNA, 20 bp, synthetic construct
  misc_feature 1..20: note = Description of Artificial Sequence: Synthetic oligonucleotide
  source 1..20: mol_type = other DNA
ccgtcgcccttcagcacgca

SEQ ID NO: 1806 - DNA, 20 bp, synthetic construct
  misc_feature 1..20: note = Description of Artificial Sequence: Synthetic oligonucleotide
  source 1..20: mol_type = other DNA
ccgtcgcccttcagcacgca

SEQ ID NO: 1807 - DNA, 20 bp, synthetic construct
  misc_feature 1..20: note = Description of Artificial Sequence: Synthetic oligonucleotide
  source 1..20: mol_type = other DNA
ccgtcgcccttcagcacgca

SEQ ID NO: 1808 - DNA, 20 bp, synthetic construct
  misc_feature 1..20: note = Description of Artificial Sequence: Synthetic oligonucleotide
  source 1..20: mol_type = other DNA
ccgtcgcccttcagcacgca

SEQ ID NO: 1809 - DNA, 20 bp, synthetic construct
  misc_feature 1..20: note = Description of Artificial Sequence: Synthetic oligonucleotide
  source 1..20: mol_type = other DNA
ccgtcgcccttcagcacgca

SEQ ID NO: 1810 - DNA, 20 bp, synthetic construct
  misc_feature 1..20: note = Description of Artificial Sequence: Synthetic oligonucleotide
  source 1..20: mol_type = other DNA
ccgtcgcccttcagcacgca

SEQ ID NO: 1811 - DNA, 20 bp, synthetic construct
  misc_feature 1..20: note = Description of Artificial Sequence: Synthetic oligonucleotide
  source 1..20: mol_type = other DNA
ccgtcgcccttcagcacgca

SEQ ID NO: 1812 - DNA, 20 bp, synthetic construct
  misc_feature 1..20: note = Description of Artificial Sequence: Synthetic oligonucleotide
  source 1..20: mol_type = other DNA
ccgtcgcccttcagcacgca

SEQ ID NO: 1813 - DNA, 20 bp, synthetic construct
  misc_feature 1..20: note = Description of Artificial Sequence: Synthetic oligonucleotide
  source 1..20: mol_type = other DNA
ccgtcgcccttcagcacgca

SEQ ID NO: 1814 - DNA, 20 bp, synthetic construct
  misc_feature 1..20: note = Description of Artificial Sequence: Synthetic oligonucleotide
  source 1..20: mol_type = other DNA
ccgtcgcccttcagcacgca

SEQ ID NO: 1815 - DNA, 20 bp, synthetic construct
  misc_feature 1..20: note = Description of Artificial Sequence: Synthetic oligonucleotide
  source 1..20: mol_type = other DNA
ccgtcgcccttcagcacgca

SEQ ID NO: 1816 - DNA, 20 bp, synthetic construct
  misc_feature 1..20: note = Description of Artificial Sequence: Synthetic oligonucleotide
  source 1..20: mol_type = other DNA
ccgtcgcccttcagcacgca

SEQ ID NO: 1817 - DNA, 20 bp, synthetic construct
  misc_feature 1..20: note = Description of Artificial Sequence: Synthetic oligonucleotide
  source 1..20: mol_type = other DNA
cagtcgcccttcagcacgca

SEQ ID NO: 1818 - DNA, 20 bp, synthetic construct
  misc_feature 1..20: note = Description of Artificial Sequence: Synthetic oligonucleotide
  source 1..20: mol_type = other DNA
ccgtagcccttcagcacgca

SEQ ID NO: 1819 - DNA, 20 bp, synthetic construct
  misc_feature 1..20: note = Description of Artificial Sequence: Synthetic oligonucleotide
  source 1..20: mol_type = other DNA
tccatgacgttcctgacgtt

SEQ ID NO: 1820 - DNA, 20 bp, synthetic construct
  misc_feature 1..20: note = Description of Artificial Sequence: Synthetic oligonucleotide
  source 1..20: mol_type = other DNA
tccatgagcttcctgagctt

SEQ ID NO: 1821 - DNA, 24 bp, synthetic construct
  misc_feature 1..24: note = Description of Artificial Sequence: Synthetic oligonucleotide
  source 1..24: mol_type = other DNA
tgctgcttttgtgcttttgtgctt

SEQ ID NO: 1822 - DNA, 20 bp, synthetic construct
  misc_feature 1..20: note = Description of Artificial Sequence: Synthetic oligonucleotide
  source 1..20: mol_type = other DNA
gcctcagtctgcttcgcacc

SEQ ID NO: 1823 - DNA, 20 bp, synthetic construct
  misc_feature 1..20: note = Description of Artificial Sequence: Synthetic oligonucleotide
  source 1..20: mol_type = other DNA
gcctcagtctgcttcgcacc

SEQ ID NO: 1824 - DNA, 20 bp, synthetic construct
  misc_feature 1..20: note = Description of Artificial Sequence: Synthetic oligonucleotide
  source 1..20: mol_type = other DNA
gcctcagtctgcttcgcacc

SEQ ID NO: 1825 - DNA, 20 bp, synthetic construct
  misc_feature 1..20: note = Description of Artificial Sequence: Synthetic oligonucleotide
  source 1..20: mol_type = other DNA
gtccctgaagatgtcaatgc

SEQ ID NO: 1826 - DNA, 20 bp, synthetic construct
  misc_feature 1..20: note = Description of Artificial Sequence: Synthetic oligonucleotide
  source 1..20: mol_type = other DNA
gtccctgaagatgtcaatgc

SEQ ID NO: 1827 - DNA, 20 bp, synthetic construct
  misc_feature 1..20: note = Description of Artificial Sequence: Synthetic oligonucleotide
  source 1..20: mol_type = other DNA
gtccctgaagatgtcaatgc

SEQ ID NO: 1828 - DNA, 20 bp, synthetic construct
  misc_feature 1..20: note = Description of Artificial Sequence: Synthetic oligonucleotide
  source 1..20: mol_type = other DNA
gtccctgaagatgtcaatgc

SEQ ID NO: 1829 - DNA, 20 bp, synthetic construct
  misc_feature 1..20: note = Description of Artificial Sequence: Synthetic oligonucleotide
  source 1..20: mol_type = other DNA
gtccctgaagatgtcaatgc

SEQ ID NO: 1830 - DNA, 20 bp, synthetic construct
  misc_feature 1..20: note = Description of Artificial Sequence: Synthetic oligonucleotide
  source 1..20: mol_type = other DNA
gcctcagtctgcttcgcacc

SEQ ID NO: 1831 - DNA, 20 bp, synthetic construct
  misc_feature 1..20: note = Description of Artificial Sequence: Synthetic oligonucleotide
  source 1..20: mol_type = other DNA
gcctcagtctgcttcgcacc

SEQ ID NO: 1832 - DNA, 10 bp, synthetic construct
  misc_feature 1..10: note = Description of Artificial Sequence: Synthetic oligonucleotide
  source 1..10: mol_type = other DNA
agaaatgcca

SEQ ID NO: 1833 - DNA, 10 bp, synthetic construct
  misc_feature 1..10: note = Description of Artificial Sequence: Synthetic oligonucleotide
  source 1..10: mol_type = other DNA
tcttccttga

SEQ ID NO: 1834 - DNA, 20 bp, synthetic construct
  misc_feature 1..20: note = Description of Artificial Sequence: Synthetic oligonucleotide
  source 1..20: mol_type = other DNA
ccgtcgcccttcagcacgca
